(19) United States
(12) Patent Application Publication
(10) Pub. No.: US 2023/0183295 A1
(43) Pub. Date: Jun. 15, 2023

(54) RECOMBINANT BACTERIA FOR USE AS A VACCINE TO PREVENT COVID19 INFECTION

(71) Applicant: Synlogic Operating Company, Inc., Cambridge, MA (US)

(72) Inventors: Jian-Rong Gao, Malden, MA (US); Caroline Kurtz, Sudbury, MA (US); Anna Sokolovska, Somerville, MA (US); Ning Li, Winchester, MA (US)

(21) Appl. No.: 17/917,057

(22) PCT Filed: Apr. 7, 2021
(86) PCT No.: PCT/US2021/026106

§ 371 Date: Oct. 5, 2022

Related U.S. Application Data
(60) Provisional application No. 63/079,551, filed on Sep. 17, 2020.
(60) Provisional application No. 63/065,774, filed on Aug. 14, 2020.
(60) Provisional application No. 63/006,604, filed on Apr. 7, 2020.

(51) Int. Cl. C07K 14/005; A61K 39/215; A61P 31/14

(52) U.S. Cl. CPC C07K 14/005; A61K 39/215; A61P 31/14; C12N 2770/20022; C12N 2770/20034; C12N 2770/20071; C07K 2319/00; C07K 2319/43; C07K 2319/21; A61K 2039/523

(57) ABSTRACT

Modified microorganisms, pharmaceutical compositions thereof, and methods of preventing and treating the coronavirus disease 2019 (COVID-19) are disclosed.

### RELATED APPLICATIONS

[0001] The instant application claims priority to U.S. Provisional Application No. 63/079,551 filed Sep. 17, 2020; U.S. Provisional Application No. 63/065,774 filed Aug. 14, 2020; and U.S. Provisional Application No. 63/006,604 filed Apr. 7, 2020; entire contents of each of which are expressly incorporated by reference herein in their entireties.

### SEQUENCE LISTING

[0002] The instant application contains a Sequence Listing which has been submitted electronically in ASCII format and is hereby incorporated by reference in its entirety. Said ASCII copy, created on Mar. 24, 2021 is named 126046-05620_SL.txt and is 1,854,483 bytes in size.

### BACKGROUND

[0003] Coronaviruses (CoV) are a large family of viruses that cause diseases in mammals and birds. Coronaviruses constitute the subfamily Orthocoronavirinae, in the family Coronaviridae. They are enveloped viruses with a positive-sense single-stranded RNA genome and a nucleocapsid of helical symmetry. The genome size of coronaviruses ranges from approximately 27 to 34 kilobases. The name coronavirus is derived from the Latin corona, meaning “crown” or “halo”, which refers to the characteristic appearance reminiscent of a crown or a solar corona around the virions (virus particles) when viewed under two-dimensional transmission electron microscopy, due to the surface covering in club-shaped protein spikes.

[0004] Coronaviruses can cause illness ranging from the common cold to more severe diseases. For example, infections with the human coronavirus strains CoV-229E, CoV-OC43, CoV-NL63 and CoV-HKU1 usually result in mild, self-limiting upper respiratory tract infections, such as a common cold, e.g., runny nose, sneezing, headache, cough, sore throat or fever (Zumla A. et al., Nature Reviews Drug Discovery 15(5): 327-47, 2016; (Cheng V. C., et al., Clin. Microbial. Rev. 20: 660-694, 2007; Chan J. F. et al., Clin. Microbial. Rev. 28: 465-522, 2015). Other infections may result in more severe diseases such as Middle East Respiratory Syndrome (MERS-CoV) and Severe Acute Respiratory Syndrome (SARS-CoV), diseases associated with pneumonia, severe acute respiratory syndrome, kidney failure and death.

[0005] MERS-CoV and SARS-CoV have received global attention over the past decades owing to their ability to cause community and health-care-associated outbreaks of severe infections in human populations. MERS-CoV is a viral respiratory disease that was first reported in Saudi Arabia in 2012 and has since spread to more than 27 other countries, according to the World Health Organization (de Groot, R. J. et al., J. Virol. 87: 7790-7792, 2013). SARS was first reported in Asia in 2003, and quickly spread to about two dozen countries before being contained after about four months (Lee N. et al., N. Engl. J. Med. 348: 1986-1994, 2003; Peiris J. S. et al., Lancet 36: 1319-1325, 2003). Detailed investigations found that SARS-CoV was transmitted from civet cats to humans and MERS-CoV from dromedary camels to humans (Cheng V. C., et al., Clin. Microbial. Rev. 20: 660-694, 2007; Chan J. F. et al., Clin. Microbial. Rev. 28: 465-522, 2015).

[0006] SARS-coronavirus 2 (SARS-CoV2), named by the World Health Organization as coronavirus disease 2019 (“COVID-19”), is a positive strand RNA virus in the Coronaviridae family (genus Betacoronavirus) that is believed to be the causative agent for a respiratory illness known as COVID-19 that recently emerged as outbreak in Wuhan China in December 2019, and has rapidly spread globally from person to person contact. According the WHO (report 58) as of Mar. 18, 2020 there were 191,127 cases globally and 7,807 deaths, with cases occurring in over 160 countries and territories, leading the WHO to declare the outbreak a global pandemic. By now (June 2020) more than 6 million people have been infected with more than 300,000 deaths. SARS-CoV2 has spread rapidly in Europe and the US currently leading to efforts to control spread and isolate patients and those entering the country who may be carrying the virus. There are currently no antiviral treatments or vaccines approved for the prevention or treatment of SARS-CoV2, and the pandemic was brought under control through travel restrictions, patient isolation, and quarantine of contacts.

[0007] Coronaviruses viruses pose major challenges to clinical management because many questions regarding transmission and control remain unanswered. Moreover, there is currently no vaccine to prevent infections by coronavirus, and there are no specific antiviral treatments available or proven to be effective to treat or prevent coronavirus infection in subjects.

[0008] Accordingly, there exists an immediate need for therapeutics to treat and prevent coronavirus infections.

### SUMMARY

[0009] The present disclosure provides compositions, methods, and uses of microorganisms that can prevent and/or treat infection with a virus, e.g., a coronavirus, e.g., a SARS-CoV-2. In certain aspects, the present disclosure provides microorganisms, that are engineered to produce one or more viral antigens. In some embodiments, the microorganisms further produce one or more immune modulator(s), e.g., immune initiators and/or sustainers. In certain aspects, the engineered microorganism is a bacteria, e.g., Salmonella typhimurium, Escherichia coli Nissle, Clostridium novyi NT, and Clostridium butyricum miyairi, as well as other exemplary bacterial strains provided herein, are able to selectively target a viral infection. Thus, in certain embodiments, the engineered microorganisms are administered, e.g., via oral administration, intravenous injection, subcutaneous injection, intranasal delivery, or other means, and are able to selectively target the coronavirus at the infected cells.

[0010] In one embodiment, the microorganism induces a CTL response to the virus. In one embodiment, the microorganism produces a CTL response against epitopes in the viral nucleocapsid (N) and/or M protein. Such antigens and epitopes are well known in the art and described at least in Liu et al., Antiviral Research 137 (2017), 82-92; Huang et al., Vaccine 25 (2007):6981-6991; Ahmed et al., Viruses (2020) 12:254; Grifoni et al., Cell Host & Microbiome (2020) 27:1-10; and Chen et al., J. Immunol (2005) 175:591-598, the entire contents of each of which are expressly incorporated by reference herein in their entireties.

[0011] In one aspect, disclosed herein is a modified microorganism capable of producing at least one viral antigen. In one aspect, disclosed herein is a modified microorganism capable of producing at least one immune modulator. In one aspect, disclosed herein is a modified microorganism capable of producing at least one viral antigen and at least one immune modulator.

[0012] In another aspect, disclosed herein is a composition comprising a viral antigen, e.g., a viral spike protein from a coronavirus, e.g., a viral spike protein receptor binding domain (RBD) from SARS-CoV2.

[0013] In another aspect, disclosed herein is a composition comprising an immune modulator. In some embodiments, the immune modulator comprises an immune initiator, e.g., a cytokine, chemokine, single chain antibody, ligand, metabolic converter, T cell co-stimulatory receptor, T cell co-stimulatory receptor ligand, or lytic peptide. In some embodiments, the immune modulator comprises an immune modulator, e.g., a chemokine, a cytokine, a single chain antibody, a ligand, a metabolic converter, a T cell co-stimulatory receptor, or a T cell co-stimulatory receptor ligand.

[0014] In another aspect, disclosed herein is a composition comprising a first modified microorganism capable of producing at least one viral antigen and at least a second modified microorganism capable of producing at least one immune modulator.

[0015] In one embodiment, the immune initiator is capable of enhancing oncolysis, activating antigen presenting cells (APCs), and/or priming and activating T cells. In another embodiment, the immune initiator is capable of enhancing oncolysis. In another embodiment, the immune initiator is capable of activating APCs. In yet another embodiment, the immune initiator is capable of priming and activating T cells.

[0016] In one embodiment, the immune initiator is a therapeutic molecule encoded by at least one gene. In one embodiment, the immune initiator is a therapeutic molecule produced by an enzyme encoded by at least one gene. In one embodiment, the immune imitator is at least one enzyme of a biosynthetic pathway or a catabolic pathway encoded by at least one gene. In one embodiment, the immune imitator is at least one therapeutic molecule produced by at least one enzyme of a biosynthetic pathway or a catabolic pathway encoded by at least one gene. In one embodiment, the immune imitator is a nucleic acid molecule that mediates RNA interference, microRNA response or inhibition, TLR response, antisense gene regulation, target protein binding, or gene editing.

[0017] In one embodiment, the immune imitator is a cytokine, a chemokine, a single chain antibody, a ligand, a metabolic converter, a T cell co-stimulatory receptor, a T cell co-stimulatory receptor ligand, or a lytic peptide. In one embodiment, the immune initiator is a secreted peptide or a displayed peptide.

[0018] In one embodiment, the immune initiator is a STING agonist, arginine, 5-FU, TNFα, IFNγ, IFNβ1, agonistic anti-CD40 antibody, CD40L, SIRPα, GMCSF, agonistic anti-OXO40 antibody, OXO40, agonistic anti-4-1BB antibody, 4-1BBL, agonistic anti-GITR antibody, GITRL, anti-PD1 antibody, anti-PDL1 antibody, or azurin. In one embodiment, the immune initiator is a STING agonist. In one embodiment, the immune initiator is at least one enzyme of an arginine biosynthetic pathway. In one embodiment, the immune initiator is arginine. In one embodiment, the immune initiator is 5-FU. In one embodiment, the immune initiator is TNFα. In one embodiment, the immune initiator is IFNγ. In one embodiment, the immune initiator is IFNβ1. In one embodiment, the immune initiator is an agonistic anti-CD40 antibody. In one embodiment, the immune initiator is SIRPα. In one embodiment, the immune initiator is CD40L. In one embodiment, the immune initiator is GMCSF. In one embodiment, the immune initiator is an agonistic anti-OXO40 antibody. In another embodiment, the immune initiator is OXO40L. In one embodiment, the immune initiator is an agonistic anti-4-1BB antibody. In one embodiment, the immune initiator is 4-1BBL. In one embodiment, the immune initiator is an agonistic anti-GITR antibody. In another embodiment, the immune initiator is GITRL. In one embodiment, the immune initiator is an anti-PD1 antibody. In one embodiment, the immune initiator is an anti-PDL1 antibody. In one embodiment, the immune initiator is azurin.

[0019] In one embodiment, the immune initiator is a STING agonist. In one embodiment, the STING agonist is c-diAMP. In one embodiment, the STING agonist is c-GAMP. In one embodiment, the STING agonist is c-diGMP.

[0020] In one embodiment, the modified microorganism comprises at least one gene sequence encoding an enzyme which produces the immune initiator. In one embodiment, the at least one gene sequence encoding the immune initiator is a dacA gene sequence. In one embodiment, the at least one gene sequence encoding the immune initiator is a cGAS gene sequence. In one embodiment, the cGAS gene sequence is a human cGAS gene sequence. In one embodiment, the cGAS gene sequence is selected from a human cGAS gene sequence a Verminephrobacter eiseniae cGAS gene sequence, Kingella denitrificans cGAS gene sequence, and a Neisseria bacilliformis cGAS gene sequence.

[0021] In one embodiment, the at least one gene sequence encoding the immune initiator is integrated into a chromosome of the modified microorganism. In one embodiment, the at least one gene sequence encoding the immune initiator is present on a plasmid. In one embodiment, the at least one gene sequence encoding the immune initiator is operably linked to an inducible promoter. In one embodiment, the inducible promoter is induced by low oxygen, anaerobic, or hypoxic conditions.

[0022] In one embodiment, the immune initiator is arginine. In another embodiment, the immune initiator is at least one enzyme of an arginine biosynthetic pathway.

[0023] In one embodiment, the microorganism comprises at least one gene sequence encoding the at least one enzyme of the arginine biosynthetic pathway. In one embodiment, the at least one gene sequence encoding the at least one enzyme of the arginine biosynthetic pathway comprises feedback resistant argA. In one embodiment, the at least one gene sequence encoding the at least one enzyme of the arginine biosynthetic pathway is selected from the group consisting of: argA, argB, argC, argD, argE, argF, argG, argH, argI, argJ, carA, and carB. In one embodiment, the microorganism further comprises a deletion or a mutation in an arginine repressor gene (argR). In one embodiment, the at least one gene sequence for the production of arginine is integrated into a chromosome of the modified microorganism. In one embodiment, the at least one gene sequence for the production of arginine is present on a plasmid. In one embodiment, the at least one gene sequence for the production of arginine is operably linked to an inducible promoter. In one embodiment, the inducible promoter is induced by low oxygen, anaerobic, or hypoxic conditions.

[0024] In one embodiment, the immune initiator is 5-FU.

[0025] In one embodiment, the microorganism comprises at least one gene sequence encoding an enzyme capable of converting 5-FC to 5-FU. In one embodiment, the at least one gene sequence is codA. In one embodiment, the at least one gene sequence is integrated into a chromosome of the modified microorganism. In another embodiment, the at least one gene sequence is present on a plasmid. In one embodiment, the at least one gene sequence encoding the immune initiator is operably linked to an inducible promoter. In one embodiment, the inducible promoter is an FNR promoter.

[0026] In one embodiment, the immune sustainer is capable of enhancing trafficking and infiltration of T cells, enhancing recognition of target cells by T cells, enhancing effector T cell response, and/or overcoming immune suppression. In one embodiment, the immune sustainer is capable of enhancing trafficking and infiltration of T cells. In one embodiment, the immune sustainer is capable of enhancing recognition of target cells by T cells. In one embodiment, the immune sustainer is capable of enhancing effector T cell response. In one embodiment, the immune sustainer is capable of overcoming immune suppression.

[0027] In one embodiment, the immune sustainer is a therapeutic molecule encoded by at least one gene. In one embodiment, the immune sustainer is a therapeutic molecule produced by an enzyme encoded by at least one gene. In one embodiment, the immune sustainer is at least one enzyme of a biosynthetic or catabolic pathway encoded by at least one gene. In one embodiment, the immune sustainer is at least one therapeutic molecule produced by at least one enzyme of a biosynthetic or catabolic pathway encoded by at least one gene. In one embodiment, the immune sustainer is a nucleic acid molecule that mediates RNA interference, microRNA response or inhibition, TLR response, antisense gene regulation, target protein binding, or gene editing.

[0028] In one embodiment, the immune sustainer is a cytokine, a chemokine, a single chain antibody, a ligand, a metabolic converter, a T cell co-stimulatory receptor, a T cell co-stimulatory receptor ligand, or a secreted or displayed peptide.

[0029] In one embodiment, the immune sustainer is a metabolic converter, arginine, a STING agonist, CXCL9, CXCL10, anti-PD1 antibody, anti-PDL1 antibody, anti-CTLA4 antibody, agonistic anti-GITR antibody or GITRL, agonistic anti-OX40 antibody or OX40L, agonistic anti-4-1BB antibody or 4-1BBL, IL-15, IL-15 sushi, IFNγ, or IL-12. In one embodiment, the immune sustainer is a secreted peptide or a displayed peptide.

[0030] In one embodiment, the immune sustainer is a metabolic converter. In one embodiment, the metabolic converter is at least one enzyme of a kynurenine consumption pathway. In another embodiment, the metabolic converter is at least one enzyme of an adenosine consumption pathway. In another embodiment, the metabolic converter is at least one enzyme of an arginine biosynthetic pathway.

[0031] In one embodiment, the microorganism comprises at least one gene sequence encoding the at least one enzyme of the kynurenine consumption pathway. In one embodiment, the at least one gene sequence encoding the at least one enzyme of the kynurenine consumption pathway is a kynureninase gene sequence. In one embodiment, he at least one gene sequence is kynU. In one embodiment, the at least one gene sequence is operably linked to a constitutive promoter. In one embodiment, the at least one gene sequence encoding the at least one enzyme of the kynurenine consumption pathway is integrated into a chromosome of the microorganism. In another embodiment, the at least one gene sequence encoding the at least one enzyme of the kynurenine consumption pathway is present on a plasmid. In one embodiment, the microorganism comprises a deletion or a mutation in trpE.

[0032] In one embodiment, the microorganism comprises at least one gene sequence encoding at least one enzyme of an adenosine consumption pathway. In one embodiment, the at least one gene sequence encoding the at least one enzyme of the adenosine consumption pathway is selected from add, xapA, deoD, xdhA, xdhB, and xdhC. In one embodiment, the at least one gene sequence encoding the at least one enzyme of the adenosine consumption pathway is operably linked to a promoter induced by low oxygen, anaerobic, or hypoxic conditions. In one embodiment, the at least one gene sequence encoding the at least one enzyme of the adenosine consumption pathway is integrated into a chromosome of the microorganism. In another embodiment, the at least one gene sequence is present on a plasmid. In one embodiment, the modified microorganism comprises at least one gene sequence encoding an enzyme for importing adenosine into the microorganism. In one embodiment, the at least one gene sequence encoding the enzyme for importing adenosine into the microorganism is nupC or nupG.

[0033] In one embodiment, the immune sustainer is arginine. In one embodiment, the microorganism comprises at least one gene sequence encoding at least one enzyme of the arginine biosynthetic pathway. In one embodiment, the at least one gene sequence encoding at least one enzyme of the arginine biosynthetic pathway comprises feedback resistant argA. In one embodiment, the at least one gene sequence encoding the at least one enzyme of the arginine biosynthetic pathway is selected from the group consisting of: argA, argB, argC, argD, argE, argF, argG, argH, argI, argJ, carA, and carB. In one embodiment, the at least one gene sequence encoding the at least one enzyme of the arginine biosynthetic pathway is operably linked to a promoter induced by low oxygen, anaerobic, or hypoxic conditions. In one embodiment, the at least one gene sequence encoding the at least one enzyme of the arginine biosynthetic pathway is integrated into a chromosome of the modified microorganism or is present on a plasmid. In one embodiment, the microorganism further comprises a deletion or a mutation in an arginine repressor gene (argR).

[0034] In one embodiment, the immune sustainer is a STING agonist. In one embodiment, the STING agonist is c-diAMP, c-GAMP, or c-diGMP. In another embodiment, the modified microorganism comprises at least one gene sequence encoding an enzyme which produces the STING agonist. In one embodiment, the at least one gene sequence encoding the immune sustainer is a dacA gene sequence. In one embodiment, the at least one gene sequence encoding the immune sustainer is a cGAS gene sequence. In one embodiment, the cGAS gene sequence is selected from a human cGAS gene sequence, a Verminephrobacter eiseniae cGAS gene sequence, Kingella denitrificans cGAS gene sequence, and a Neisseria bacilliformis cGAS gene sequence.

[0035] In one embodiment, the immune initiator is not the same as the immune sustainer. In one embodiment, the immune initiator is different than the immune sustainer.

[0036] In one embodiment, the modified microorganism comprises at least one gene sequence encoding an enzyme capable of producing the STING agonist. In one embodiment, the at least one gene sequence encoding the STING agonist is a dacA gene. In one embodiment, the at least one gene sequence encoding the STING agonist is a cGAS gene. In one embodiment, the STING agonist is c-diAMP. In one embodiment, the STING agonist is c-GAMP. In one embodiment, the STING agonist is c-diGMP.

[0037] In one embodiment, the bacterium is an auxotroph in a gene that is not complemented when the bacterium is present in a host. In one embodiment, the gene that is not complemented when the bacterium is present in a host is a dapA gene. In one embodiment, expression of the dapA gene fine-tunes the expression of the one or more immune initiators. In one embodiment, the bacterium is an auxotroph in a gene that is complemented when the bacterium is present in a host. In one embodiment, the gene that is complemented when the bacterium is present in a host is a thyA gene.

[0038] In one embodiment, the bacterium further comprises a mutation or deletion in an endogenous prophage.

[0039] In one embodiment, the at least one gene sequence is operably linked to an inducible promoter. In one embodiment, the inducible promoter is induced by low-oxygen or anaerobic conditions. In one embodiment, the inducible promoter is induced by a hypoxic environment. In one embodiment, the promoter is an FNR promoter.

[0040] In one embodiment, the at least one gene sequence is integrated into a chromosome in the bacterium. In one embodiment, the at least one gene sequence is located on a plasmid in the bacterium.

[0041] In one embodiment, the bacterium is non-pathogenic. In one embodiment, the bacterium is Escherichia coli Nissle.

[0042] In one aspect, disclosed herein is a modified microorganism capable of producing an effector molecule, wherein the effector molecule is selected from the group consisting of CXCL9, CXCL10, hyaluronidase, and SIRPα.

[0043] In one embodiment, the modified microorganism comprises at least one gene sequence encoding CXCL9. In one embodiment, the at least one gene sequence encoding CXCL9 is linked to an inducible promoter.

[0044] In one embodiment, the modified microorganism comprises at least one gene sequence encoding CXCL10. In one embodiment, the at least one gene sequence encoding CXCL10 is linked to an inducible promoter.

[0045] In one embodiment, the modified microorganism comprises at least one gene sequence encoding hyaluronidase. In one embodiment, the at least one gene sequence encoding hyaluronidase is linked to an inducible promoter.

[0046] In one embodiment, the modified microorganism comprises at least one gene sequence encoding the SIRPα. In one embodiment, the at least one gene sequence encoding the SIRPα is linked to an inducible promoter.

[0047] In one embodiment, the effector molecule is secreted. In another embodiment, the effector molecule is displayed on the cell surface.

[0048] In one aspect, disclosed herein is a modified microorganism capable of converting 5-FC to 5-FU. In another aspect, disclosed herein is a modified microorganism capable of converting 5-FC to 5-FU, wherein the modified microorganism is further capable of producing a STING agonist.

[0049] In one embodiment, the microorganism comprises at least one gene sequence encoding an enzyme capable of converting 5-FC to 5-FU. In one embodiment, the at least one gene sequence is codA. In one embodiment, the at least one gene sequence is a codA::upp fusion. In one embodiment, the at least one gene sequence is operably linked to an inducible promoter or a constitutive promoter. In one embodiment, the inducible promoter is a FNR promoter. In one embodiment, the at least one gene sequence is integrated into the chromosome of the microorganism or is present on a plasmid.

[0050] In one embodiment, the microorganism capable of converting 5-FC to 5-FU is further capable of producing a STING agonist. In one embodiment, the STING agonist is c-diAMP, c-GAMP, or c-diGMP. In one embodiment, the modified microorganism comprises at least one gene sequence encoding an enzyme which produces the STING agonist. In one embodiment, the at least one gene sequence encoding the enzyme which produces the STING agonist is a dacA gene sequence. In one embodiment, the at least one gene sequence encoding the enzyme which produces the STING agonist is a cGAS gene sequence. In one embodiment, the cGAS gene sequence is a human cGAS gene sequence. In one embodiment, the at least one gene sequence encoding the enzyme which produces the STING agonist is operably linked to an inducible promoter. In one embodiment, the inducible promoter is an FNR promoter. In one embodiment, the at least one gene sequence encoding the enzyme which produces the STING agonist is integrated into a chromosome of the microorganism or is present on a plasmid.

[0051] In one embodiment, the modified microorganism disclosed herein is a bacterium. In one embodiment, the modified microorganism disclosed herein is a yeast. In one embodiment, the modified microorganism is an E. coli bacterium. In one embodiment, the modified microorganism is an E. coli Nissle bacterium.

[0052] In one embodiment, the modified microorganism disclosed herein comprises at least one mutation or deletion in a gene which results in one or more auxotrophies. In one embodiment, the at least one deletion or mutation is in a dapA gene and/or a thyA gene.

[0053] In one embodiment, the modified microorganism disclosed herein comprises a phage deletion.

[0054] In one aspect, disclosed herein is a composition comprising at least a first modified microorganism capable of producing a viral antigen, and at least a second modified microorganism capable of producing an immune modulator.

[0055] In one aspect, disclosed herein is a composition comprising a viral antigen and at least one modified microorganism capable of producing an immune modulator. In one embodiment, the at least one modified microorganism is capable of producing both the immune initiator and the immune sustainer. In another embodiment, the at least one modified microorganism is capable of producing the immune initiator, and at least a second modified microorganism is capable of producing the immune sustainer. In yet another embodiment, the immune sustainer is not produced by a modified microorganism in the composition. In another embodiment, the at least one modified microorganism is capable of producing the immune sustainer, and at least a second modified microorganism is capable of producing the immune initiator. In yet another embodiment, the immune initiator is not produced by a modified microorganism in the composition.

[0056] In one embodiment, the immune initiator is not arginine, TNFα, IFNγ, IFNβ1, GMCSF, anti-CD40 antibody, CD40L, agonistic anti-OX40 antibody, OXO40L, agonistic anti-41BB antibody, 41BBL, agonistic anti-GITR antibody, GITRL, anti-PD1 antibody, anti-PDL1 antibody, and/or azurin. In one embodiment, the immune initiator is not arginine. In one embodiment, the immune initiator is not TNFα. In one embodiment, the immune initiator is not IFNγ. In one embodiment, the immune initiator is not IFNβ1. In one embodiment, the immune initiator is not an anti-CD40 antibody. In one embodiment, the immune initiator is not CD40L. In one embodiment, the immune initiator is not GMCSF. In one embodiment, the immune initiator is not an agonistic anti-OXO40 antibody. In one embodiment, the immune initiator is not OXO40L. In one embodiment, the immune initiator is not an agonistic anti-4-1BB antibody. In one embodiment, the immune initiator is not 4-1BBL. In one embodiment, the immune initiator is not an agonistic anti-GITR antibody. In one embodiment, the immune initiator is not GITRL. In one embodiment, the immune initiator is not an anti-PD1 antibody. In one embodiment, the immune initiator is not an anti-PDL1 antibody. In one embodiment, the immune initiator is not azurin.

[0057] In one embodiment, the immune sustainer is not at least one enzyme of a kynurenine consumption pathway, at least one enzyme of an adenosine consumption pathway, anti-PD1 antibody, anti-PDL1 antibody, anti-CTLA4 antibody, IL-15, IL-15 sushi, IFNγ, agonistic anti-GITR antibody, GITRL, an agonistic anti-OX40 antibody, OX40L, an agonistic anti-4-1BB antibody, 4-1BBL, or IL-12. In one embodiment, the immune sustainer is not at least one enzyme of a kynurenine consumption pathway. In one embodiment, the immune sustainer is not at least one enzyme of an adenosine consumption pathway. In one embodiment, the immune sustainer is not arginine. In one embodiment, the immune sustainer is not at least one enzyme of an arginine biosynthetic pathway. In one embodiment, the immune sustainer is not an anti-PD1 antibody. In one embodiment, the immune sustainer is not an anti-PDL1 antibody. In one embodiment, the immune sustainer is not an anti-CTLA4 antibody. In one embodiment, the immune sustainer is not an agonistic anti-GITR antibody. In one embodiment, the immune sustainer is not GITRL. In one embodiment, the immune sustainer is not IL-15. In one embodiment, the immune sustainer is not IL-15 sushi. In one embodiment, the immune sustainer is not IFNγ. In one embodiment, the immune sustainer is not an agonistic anti-OX40 antibody. In one embodiment, the immune sustainer is not OX40L. In one embodiment, the immune sustainer is not an agonistic anti-4-1BB antibody. In one embodiment, the immune sustainer is not 4-1BBL. In one embodiment, the immune sustainer is not IL-12.

[0058] In one embodiment, the modified microorganism comprises a nucleic acid encoding a fusion protein, wherein the fusion protein comprises an anchor and the at least one viral antigen. In one embodiment, the anchor is selected from the group consisting of OmpA, Intimin, IgA, and YiaT.

[0059] In one embodiment, the fusion protein further comprises i) a FLAG tag, ii) a linker, iii) a His tag, or iv) combinations of i)-iii). In one embodiment, the linker is selected from the group consisting of GGGGS (SEQ ID NO: 1477), (GGGGS)×2 (SEQ ID NO: 1478), (GGGGS)×3 (SEQ ID NO: 1479), EAAAK (SEQ ID NO: 1480), (EAAAK)×2 (SEQ ID NO: 1481), and (EAAAK)×3 (SEQ ID NO: 1482).

[0060] In one embodiment, the anchor comprises a nucleic acid sequence having at least 80%, 85%, 90%, 95%, or 100% identity to any one of SEQ ID NOs: 1447-1450. In one embodiment, the anchor comprises an amino acid sequence having at least 80%, 85%, 90%, 95%, or 100% identity to any one of SEQ ID NOs: 1462-1465. In one embodiment, the viral antigen comprises a nucleic acid sequence having at least 80%, 85%, 90%, 95%, or 100% identity to SEQ ID NO: 1451. In one embodiment, the viral antigen comprises a nucleic acid sequence having at least 80%, 85%, 90%, 95%, or 100% identity to SEQ ID NO: 1466. In one embodiment, the nucleic acid encoding the fusion protein comprises a nucleic acid sequence having at least 80%, 85%, 90%, 95%, or 100% identity to any one of SEQ ID NOs: 1452-1461. In one embodiment, the fusion protein comprises an amino acid sequence having at least 80%, 85%, 90%, 95%, or 100% identity to any one of SEQ ID NOs: 1467-1476. In one embodiment, the linker comprises a nucleic acid sequence having at least 95%, 97%, or 100% identity to any one of SEQ ID NOs: 1477-1482.

[0061] In one embodiment, the modified microorganism is capable of inducing expression of antibodies against the viral antigen in a subject. In one embodiment, the modified microorganism is capable of inducing expression of antibodies against the viral antigen in a subject at least 2-fold, at least 5-fold, at least 10-fold, at least 20-fold, at least 50-fold, at least 100-fold, at least 200-fold, at least 500-fold, at least 1000-fold more than a control.

[0062] In one aspect, disclosed herein is a composition comprising a modified microorganism disclosed herein. In one embodiment, the composition further comprises an immune modulator.

[0063] In one aspect, disclosed herein is a pharmaceutically acceptable composition comprising a modified microorganism disclosed herein, and a pharmaceutically acceptable carrier. In one aspect, disclosed herein is a pharmaceutically acceptable composition comprising a composition disclosed herein, and a pharmaceutically acceptable carrier. In one embodiment, the composition is formulated for intranasal delivery. In another embodiment, the pharmaceutically acceptable composition is for use in treating a subject having an coronavirus infection. In another embodiment, the pharmaceutically acceptable composition is for use in treating a subject having the coronavirus disease 2019 (COVID-19). In another embodiment, the pharmaceutically acceptable composition is for use in inducing and modulating an immune response in a subject.

[0064] In one aspect, disclosed herein is a kit comprising a pharmaceutically acceptable composition disclosed herein, and instructions for use thereof.

[0065] In one aspect, disclosed herein is a method of treating the coronavirus disease 2019 (COVID-19) in a subject, the method comprising administering to the subject a pharmaceutically acceptable composition disclosed herein, thereby treating the coronavirus disease 2019 (COVID-19) in the subject.

[0066] In one aspect, disclosed herein is a method of inducing and sustaining an immune response in a subject, the method comprising administering to the subject a pharmaceutically acceptable composition disclosed herein, thereby inducing and sustaining the immune response in the subject.

[0067] In one aspect, disclosed herein is a method of inducing and sustaining an immune response in a subject, the method comprising administering to the subject a pharmaceutically acceptable composition described herein, thereby inducing and sustaining the immune response in the subject.

[0068] In one aspect, disclosed herein is a method of treating the coronavirus disease 2019 (COVID-19) in a subject, the method comprising administering a first modified microorganism to the subject, wherein the first modified microorganism is capable of producing a viral antigen; and administering a second modified microorganism to the subject, wherein the second modified microorganism is capable of producing an immune modulator, thereby treating the coronavirus disease 2019 (COVID-19) in the subject.

[0069] In one aspect, disclosed herein is a method of inducing and sustaining an immune response in a subject, the method comprising administering a first modified microorganism to the subject, wherein the first modified microorganism is capable of producing a viral antigen; and administering a second modified microorganism to the subject, wherein the second modified microorganism is capable of producing an immune modulator, thereby inducing and sustaining the immune response in the subject.

[0070] In one embodiment, the administering steps are performed at the same time. In one embodiment, the administering of the first modified microorganism to the subject occurs before the administering of the second modified microorganism to the subject. In one embodiment, the administering of the second modified microorganism to the subject occurs before the administering of the first modified microorganism to the subject.

[0071] In one aspect, disclosed herein is a method of treating the coronavirus disease 2019 (COVID-19) in a subject, the method comprising administering a first modified microorganism to the subject, wherein the first modified microorganism is capable of producing a viral antigen; and administering an immune modulator to the subject, thereby treating the coronavirus disease 2019 (COVID-19) in the subject.

[0072] In one aspect, disclosed herein is a method of inducing and sustaining an immune response in a subject, the method comprising administering a first modified microorganism to the subject, wherein the first modified microorganism is capable of producing a viral antigen; and administering an immune modulator to the subject, thereby inducing and sustaining the immune response in the subject.

[0073] In one embodiment, the administering steps are performed at the same time. In one embodiment, the administering of the first modified microorganism to the subject occurs before the administering of the immune sustainer to the subject. In another embodiment, the administering of the immune sustainer to the subject occurs before the administering of the first modified microorganism to the subject.

[0074] In one aspect, disclosed herein is a method of treating the coronavirus disease 2019 (COVID-19) in a subject, the method comprising administering a viral antigen to the subject; and administering a first modified microorganism to the subject, wherein the first modified microorganism is capable of producing an immune modulator, thereby treating the coronavirus disease 2019 (COVID-19) in the subject.

[0075] In one aspect, disclosed herein is a method of inducing and sustaining an immune response in a subject, the method comprising administering a viral antigen to the subject; and administering a first modified microorganism to the subject, wherein the first modified microorganism is capable of producing an immune modulator, thereby inducing and sustaining the immune response in the subject.

[0076] In one embodiment, the administering steps are performed at the same time. In one embodiment, the administering of the first modified microorganism to the subject occurs before the administering of the immune initiator to the subject. In one embodiment, the administering of the immune initiator to the subject occurs before the administering of the first modified microorganism to the subject.

[0077] In one embodiment, the administering is intranasal injection.

[0078] Accordingly, the disclosure provides compositions comprising one or more modified bacteria comprising gene sequence(s) encoding one or more immune modulators. In some embodiments, the immune modulator is an immune initiator, which may for example modulate, e.g., promote cell lysis, antigen presentation by dendritic cells or macrophages, or T cell activation or priming. Examples of such immune initiators include cytokines or chemokines, such as TNFα, IFN-gamma and IFN-beta1, a single chain antibodies, such as anti-CD40 antibodies, or (3) ligands such as SIRPα or CD40L, a metabolic enzymes (biosynthetic or catabolic), such as a STING agonist producing enzyme, or (5) cytotoxic chemotherapies. The immune modulators, e.g., immune initiators, may be operably linked to a promoter not associated with the gene sequence(s) in nature.

[0079] In some embodiments, the genetically engineered bacteria are capable of producing one or more STING agonist(s), such as c-di-AMP, 3′3′-cGAMP and/or c-2′3′-cGAMP. In some embodiments, the genetically engineered bacteria comprise gene sequences encoding a diadenylate cyclase, such as DacA, e.g., from Listeria monocytogenes. In some embodiments, the genetically engineered bacteria comprise gene sequences encoding a 3′3′-cGAMP synthase. Non-limiting examples of 3′3′-cGAMP synthases described in the instant disclosure include 3′3′-cGAMP synthase Verminephrobacter eiseniae (EF01-2 Earthworm symbiont), 3′3′-cGAMP synthase from Kingella denitrificans (ATCC 33394), and 3′3′-cGAMP synthase from Neisseria bacilliformis (ATCC BAA-1200). In some embodiments, the genetically engineered bacteria comprise gene sequences encoding a 2′3′-cGAMP synthase, such as human cGAS.

[0080] In some embodiments, the genetically engineered bacteria comprise gene sequences encoding agonists of co-stimulatory receptors, including but not limited to OX40, GITR, 41BB.

[0081] In some embodiments, the composition further comprises one or more genetically engineered microorganism(s) comprising gene sequence(s) for producing an immune sustainer. Such a sustainer may be selected from a cytokine or chemokine, a single chain antibody antagonistic peptide or ligand, and a metabolic enzyme pathways.

[0082] Examples of immune sustaining cytokines which may be produced by the genetically engineered bacteria include IL-15 and CXCL10, which may be secreted into the microenvironment. Non-limiting examples of single chain antibodies include anti-PD-1, anti-PD-L1, or anti-CTLA-4, which may be secreted into the microenvironment or displayed on the microorganism cell surface.

[0083] In some embodiments, the genetically engineered bacteria comprise gene sequences encoding circuitry for one or more metabolic conversions, i.e., the bacteria are capable performing one or more enzyme-catalyzed reactions, which can be either biosynthetic or catabolic in nature. Accordingly, in some embodiments, the genetically engineered bacteria are capable of producing metabolites which modulate, e.g., promote or contribute to immune initiation and/or immune sustenance or are capable of consuming metabolites which modulate, e.g., inhibit viral infection.

[0084] In any of these compositions, the promoter operably linked to the gene sequences (s) for producing the immune modulator, e.g., the immune initiator and/or immune sustainer may an inducible promoter. In some embodiments, the promoter is induced by low-oxygen or anaerobic conditions, such as by a hypoxic environment. Non-limiting examples of such low oxygen inducible promoters of the disclosure include FNR-inducible promoters, ANR-inducible promoters, and DNR-inducible promoters. In some embodiments, the promoter operably linked to the gene sequence(s) for producing the immune modulator, e.g., the immune initiator or immune sustainer, is directly or indirectly induced by a chemical inducer that is not normally present. In some embodiments, the promoter is induced in vitro during fermentation in a suitable growth vessel. In some embodiments, the chemical inducer is selected from tetracycline, IPTG, arabinose, cumate, and salicylate.

[0085] In some embodiments, the composition comprises bacteria that are auxotrophs for a particular metabolite, e.g., the bacterium is an auxotroph in a gene that is not complemented when the microorganism(s) is present in the host. In some embodiments, the bacterium is an auxotroph in the DapA gene. In some embodiments, the composition comprises bacteria that are auxotrophs for a particular metabolite, e.g., the bacterium is an auxotroph in a gene that is complemented when the microorganism(s) is present in the host. In some embodiments, the bacterium is an auxotroph in the ThyA gene. In some embodiments, the bacterium is an auxotroph in the TrpE gene.

[0086] In some embodiments, the bacterium is a Gram-positive bacterium. In some embodiments, the bacterium is a Gram-negative bacterium. In some embodiments, the bacterium is an obligate anaerobic bacterium. In some embodiments, the bacterium is a facultative anaerobic bacterium. Non-limiting examples of bacteria contemplated in the disclosure include Clostridium novyi NT, and Clostridium butyricum, and Bifidobacterium longum. In some embodiments, the bacterium is selected from E. coli Nissle, and E. coli K-12.

[0087] In some embodiments, the bacterium comprises an antibiotic resistance gene sequence. In some embodiments, the one or more of the gene sequence(s) encoding the immune modulator(s) are present on a chromosome. In some embodiments, the one or more of the gene sequence(s) encoding the immune modulator(s) are present on a plasmid.

[0088] Additionally, pharmaceutical compositions are provided, further comprising one or more immune checkpoint inhibitors, such as CTLA-4 inhibitor, a PD-1 inhibitor, and a PD-L1 inhibitor. Such checkpoint inhibitors may be administered in combination, sequentially or concurrently with the genetically engineered bacteria.

[0089] Additionally, pharmaceutical compositions are provided, further comprising one or more agonists of co-stimulatory receptors, such as OX40, GITR, and/or 41BB, including but not limited to agonistic molecules, such as ligands or agonistic antibodies which are capable of binding to co-stimulatory receptors, such as OX40, GITR, and/or 41BB. Such agonistic molecules may be administered in combination, sequentially or concurrently with the genetically engineered bacteria.

[0090] In any of these embodiments, a combination of engineered bacteria can be used in conjunction with conventional anti-viral therapies. In any of these embodiments, the engineered bacteria can produce one or more cytotoxins or lytic peptides. In any of these embodiments, the engineered bacteria can be used in conjunction with a viral vaccine.

[0091] In one embodiment, disclosed herein is a modified bacterium comprising at least one an immune initiator, wherein the immune initiator is capable of producing a stimulator of interferon gene (STING) agonist.

### BRIEF DESCRIPTION OF THE FIGURES

[0092] FIG. 1 depicts a schematic showing the STING Pathway in Antigen Presenting Cells.

[0093] FIG. 2 depicts a schematic showing the product concept for engineered E. coli Nissle vaccine design and mechanism of action.

[0094] FIG. 3 depicts the design of S protein antigen variants for Nissle surface display.

[0095] FIG. 4 depict additional exemplary designs of S protein antigen variants for Nissle surface display.

[0096] FIG. 5 depict additional exemplary designs of S protein antigen variants for Nissle surface display.

[0097] FIG. 6 depict additional exemplary designs of S protein antigen variants for Nissle surface display.

[0098] FIG. 7 depicts a schematic of an RBD fusion protein anchored to the bacteria, as well as an analysis of the same using antibodies (ab).

[0099] FIG. 8 depicts flow cytometry (FCM) analysis of strains SYN94 (control); SYN2610 (LppOmpA-FLAG-GFP-His); SYN2615 (LppOmpA-FLAG-scFV-His); and SYN7447 (LppompA-FLAG-RBD2-His).

[0100] FIG. 9 depicts flow cytometry analysis of strains SYN94 (control); SYN2610 (LppOmpA-FLAG-GFP-His); SYN2615 (LppOmpA-FLAG-scFV-His); SYN7192 (Intimin-FLAG-aEGFRnb-His); SYN7358 (Intimin-FLAG-RBDSD1-His); SYN7436 (His-RBD2-FLAG-IgAMEP); SYN7442 (Intimin-RBDSD1×3); SYN7443 (Intimin-FLAG-RBDSD1×2); SYN7444 (YiaT-FLAG-RBD2-His); SYN7445 (Intimin-FLAG-RBD2-His); and SYN7447 (LppompA-FLAG-RBD2-His).

[0101] FIG. 10 depicts flow cytometry analysis of strains SYN94 (control); SYN7192 (Intimin-FLAG-aEGFRnb-His); SYN7358 (Intimin-FLAG-RBDSD1-His); SYN7442 (Intimin-RBDSD1×3); SYN7443 (Intimin-FLAG-RBDSD1×2); SYN7444 (YiaT-FLAG-RBD2-His); and SYN7445 (Intimin-FLAG-RBD2-His). Cells were grown at 37° C., and binding was 75 minutes in PBS containing 1% BSA.

[0102] FIG. 11A depicts flow cytometry analysis of strains SYN94 (control); SYN7192 (Intimin-FLAG-aEGFRnb-His); SYN7442 (Intimin-RBDSD1×3); SYN7443 (Intimin-FLAG-RBDSD1×2); SYN7445 (Intimin-FLAG-RBD2-His); and SYN7358 (Intimin-FLAG-RBDSD1-His) for ACE2-His binding.

[0103] FIG. 11B depicts flow cytometry analysis of strains SYN94 (control); SYN7447 (LppompA-FLAG-RBD2-His); SYN7442 (Intimin-RBDSD1×3); SYN7443 (Intimin-FLAG-RBDSD1×2); and SYN7358 (Intimin-FLAG-RBDSD1-His) for aRBD-EL binding. Cells were grown at 37° C., and binding was 75 minutes in PBS containing 1% BSA.

[0104] FIG. 12 depicts flow cytometry analysis of strains SYN4933 (control); SYN7594 (OmpA-FLAG-GFP-His); SYN7595 (OmpA-FLAG-scFV-His); SYN7596 (YiaT-FLAG-GFP-His); SYN7597 (YiaT-FLAG-RBD2-His); and SYN7598 (OmpA-FLAG-RBD2-His). Cells were grown at 37° C.

[0105] FIG. 13A depicts RBDS1-specific IgG titer determined from serum samples collected after administering 1×10⁸ total cells to mice. SYN4740 (control; auxotrophy); SYN7598 (SYNB1891-OmpA-FLAG-RBD2-HIS); SYN7563 (SYNB1891-Intimin-RBDSD1×3); and SYN7442 (WT-Intimin-RBDSD1×3). Subcutaneously (SC); intranasally (IN); intramuscularly (IM).

[0106] FIG. 13B depicts RBDS1-specific IgG titer determined from BALF samples collected after administering 1×10⁸ total cells to mice. SYN4740 (control; auxotrophy); SYN7598 (SYNB1891-OmpA-FLAG-RBD2-HIS); SYN7563 (SYNB1891-Intimin-RBDSD1×3); and SYN7442 (WT-Intimin-RBDSD1×3). Subcutaneously (SC); intranasally (IN); intramuscularly (IM).

[0107] FIG. 13C depicts RBDS1-specific IgA titer determined from serum samples collected after administering 1e8 total cells to mice. SYN4740 (control; auxotrophy); SYN7598 (SYNB1891-OmpA-FLAG-RBD2-HIS); SYN7563 (SYNB1891-Intimin-RBDSD1×3); and SYN7442 (WT-Intimin-RBDSD1×3). Subcutaneously (SC); intranasally (IN); intramuscularly (IM).

[0108] FIG. 13D depicts RBDS1-specific IgA titer determined from BALF samples collected after administering 1e8 total cells to mice. SYN4740 (control; auxotrophy); SYN7598 (SYNB1891-OmpA-FLAG-RBD2-HIS); SYN7563 (SYNB1891-Intimin-RBDSD1×3); and SYN7442 (WT-Intimin-RBDSD1×3). Subcutaneously (SC); intranasally (IN); intramuscularly (IM).

[0109] FIG. 14A depicts RBDS1-specific IgG titer determined from serum samples collected after administering 1e8 total cells to mice. EcN (control) and SYN7563 (SYNB1891-Intimin-RBDSD1×3). Subcutaneously (SC); intranasally (IN); intramuscularly (IM).

[0110] FIG. 14B depicts RBDS1-specific IgA titer determined from serum samples collected after administering 1e8 total cells to mice. EcN (control) and SYN7563 (SYNB1891-Intimin-RBDSD1×3). Subcutaneously (SC); intranasally (IN); intramuscularly (IM).

[0111] FIG. 14C depicts RBDS1-specific IgG titer determined from BALF samples collected after administering 1e8 total cells to mice. EcN (control) and SYN7563 (SYNB1891-Intimin-RBDSD1×3). Subcutaneously (SC); intranasally (IN); intramuscularly (IM).

[0112] FIG. 14D depicts RBDS1-specific IgA titer determined from BALF samples collected after administering 1e8 total cells to mice. EcN (control) and SYN7563 (SYNB1891-Intimin-RBDSD1×3). Subcutaneously (SC); intranasally (IN); intramuscularly (IM).

[0113] FIG. 15 depicts RBDS1-specific IgG titer determined from serum samples collected after administering 1e8 total cells to mice. EcN (control) and EcN-RBD. Subcutaneously (SC); intranasally (IN); intramuscularly (IM).

### DETAILED DESCRIPTION

[0114] The disclosure relates to genetically engineered microorganisms, e.g., genetically engineered bacteria, pharmaceutical compositions thereof, and methods of preventing or treating the coronavirus disease 2019 (COVID-19). In certain aspects, the compositions and methods disclosed herein may be used to deliver one or more viral antigen and/or immune modulators to a host/host cells to prevent and/or treat COVID-19 infection. In one embodiment, the microorganism is a vaccine.

[0115] This disclosure relates to compositions and therapeutic methods for the local and target-specific delivery of viral antigen and/or immune modulators in order to prevent and/or treat viral infection and/or diseases, e.g., COVID-19. In certain aspects, the disclosure relates to genetically engineered microorganisms that are capable of producing one or more effector molecules e.g., immune modulators, such as any of the effector molecules provided herein. In certain aspects, the disclosure relates to genetically engineered bacteria that are capable of producing one or more effector molecules, e.g., immune modulators (s).

[0116] Specifically, in some embodiments, the genetically engineered bacteria are capable of producing one or more viral antigens. In some embodiments the genetically engineered bacteria are capable of producing one or more immune modulators in combination with one or more viral antigens. In one embodiment, the subject to which the bacteria are delivered generate and sustain an immune response against the one or more viral antigens, thereby preventing and/or treating COVID19 in the subject.

[0117] In some embodiments, the viral antigen binds a cell surface receptor on the cell. In some embodiments, the cell surface receptor is angiotensin converting enzyme 2 (ACE2) receptor. In some embodiments, at least 20%, at least 30%, at least 40%, at least 50%, at least 60%, at least 70%, or at least 80% of the viral antigen displayed on the cell surface bind angiotensin converting enzyme 2 (ACE2) receptor. In some embodiments, at least 20%, at least 30%, at least 40%, at least 50%, at least 60%, at least 70%, or at least 80% of the modified microorganisms in the composition display the at least one viral antigen on their cell surface.

[0118] In some aspects, the disclosure provides a genetically engineered microorganism that is capable of delivering one or more effector molecules, e.g., immune modulators, such as immune initiators and/or immune sustainers. In some aspects, the disclosure relates to a genetically engineered microorganism that is delivered systemically, e.g., via any of the delivery means described in the present disclosure, and are capable of producing one or more effector molecules, e.g., immune initiators and/or immune sustainers, as described herein. In some aspects, the disclosure relates to a genetically engineered microorganism that is delivered locally, and are capable of producing one or more effector molecules, e.g., immune initiators and/or immune sustainers. In some aspects, the compositions and methods disclosed herein may be used to deliver one or more effector molecules, e.g., immune initiators and/or immune sustainers selectively, thereby reducing systemic cytotoxicity or systemic immune dysfunction, e.g., the onset of an autoimmune event or other immune-related adverse event.

[0119] In order that the disclosure may be more readily understood, certain terms are first defined. These definitions should be read in light of the remainder of the disclosure and as understood by a person of ordinary skill in the art. Unless defined otherwise, all technical and scientific terms used herein have the same meaning as commonly understood by a person of ordinary skill in the art. Additional definitions are set forth throughout the detailed description.

[0120] As used herein, the term “coronavirus,” (“CoV”; subfamily Coronavirinae, family Coronaviridae, order Nidovirales), refers to a group of highly diverse, enveloped, positive-sense, single-stranded RNA viruses that cause respiratory, enteric, hepatic and neurological diseases of varying severity in a broad range of animal species, including humans. Coronaviruses are subdivided into four genera: Alphacoronavirus, Betacoronavirus (13CoV), Gammacoronavirus and Deltacoronavirus.

[0121] Any coronavirus that infects humans and animals is encompassed by the term “coronavirus” as used herein. Exemplary coronaviruses encompassed by the term include the coronaviruses that cause a common cold-like respiratory illness, e.g., human coronavirus 229E (HCoV-229E), human coronavirus NL63 (HCoV-NL63), human coronavirus OC43 (HCoV-OC43), and human coronavirus HKU1 (HCoV-HKU1); the coronavirus that causes avian infectious bronchitis virus (IBV); the coronavirus that causes murine hepatitis virus (MHV); the coronavirus that causes porcine transmissible gastroenteritis virus PRCoV; the coronavirus that causes porcine respiratory coronavirus and bovine coronavirus; the coronavirus that causes Severe Acute Respiratory Syndrome (SARS), the coronavirus that causes the Middle East respiratory syndrome (MERS), and the coronavirus that causes Severe Acute Respiratory Syndrome 2 (SARS-CoV-2; COVID-19).

[0122] The coronavirus (CoV) genome is a single-stranded, non-segmented RNA genome, which is approximately 26-32 kb. It contains 5′-methylated caps and 3′-polyadenylated tails and is arranged in the order of 5′, replicase genes, genes encoding structural proteins (spike glycoprotein (S), envelope protein (E), membrane protein (M) and nucleocapsid protein (N)), polyadenylated tail and then the 3′ end. The partially overlapping 5′-terminal open reading frame 1a/b (ORF1a/b) is within the 5′ two-thirds of the CoV genome and encodes the large replicase polyprotein 1a (pp1a) and pp1ab. These polyproteins are cleaved by papain-like cysteine protease (PLpro) and 3C-like serine protease (3CLpro) to produce non-structural proteins, including RNA-dependent RNA polymerase (RdRp) and helicase (Hel), which are important enzymes involved in the transcription and replication of CoVs. The 3′ one-third of the CoV genome encodes the structural proteins (S, E, M and N), which are essential for virus-cell-receptor binding and virion assembly, and other non-structural proteins and accessory proteins that may have immunomodulatory effects. (Peiris J S., et al., 2003, Nat. Med. 10 (Suppl. 12): 88-97).

[0123] As a coronavirus is a positive-sense, single-stranded RNA virus having a 5′ methylated cap and a 3′ polyadenylated tail, once the virus enters the cell and is uncoated, the viral RNA genome attaches to the host cell's ribosome for direct translation. The host ribosome translates the initial overlapping open reading frame of the virus genome and forms a long polyprotein. The polyprotein has its own proteases which cleave the polyprotein into multiple nonstructural proteins.

[0124] A number of the nonstructural proteins coalesce to form a multi-protein replicase-transcriptase complex (RTC). The main replicase-transcriptase protein is the RNA-dependent RNA polymerase (RdRp). It is directly involved in the replication and transcription of RNA from an RNA strand. The other nonstructural proteins in the complex assist in the replication and transcription process. The exoribonuclease non-structural protein for instance provides extra fidelity to replication by providing a proofreading function which the RNA-dependent RNA polymerase lacks.

[0125] One of the main functions of the complex is to replicate the viral genome. RdRp directly mediates the synthesis of negative-sense genomic RNA from the positive-sense genomic RNA. This is followed by the replication of positive-sense genomic RNA from the negative-sense genomic RNA. The other important function of the complex is to transcribe the viral genome. RdRp directly mediates the synthesis of negative-sense subgenomic RNA molecules from the positive-sense genomic RNA. This is followed by the transcription of these negative-sense subgenomic RNA molecules to their corresponding positive-sense mRNAs

[0126] The replicated positive-sense genomic RNA becomes the genome of the progeny viruses.

[0127] As use herein, the terms “severe acute respiratory syndrome coronavirus 2,” “SARS-CoV-2,” “2019-nCoV,” refer to the novel coronavirus that caused a pneumonia outbreak first reported in Wuhan, China in December 2019 (“COVID-19”). Phylogenetic analysis of the complete viral genome (29,903 nucleotides) revealed that SARS-CoV-2 was most closely related (89.1% nucleotide similarity similarity) to SARS-CoV.

[0128] The term “SARS-CoV-2,” as used herein, also refers to naturally occurring RNA sequence variations of the SARS-CoV-2 genome.

[0129] Additional examples of coronavirus genomes and mRNA sequences are readily available using publicly available databases, e.g., GenBank, UniProt, and OMIM.

[0130] As used herein the term “immune initiation” or “initiating the immune response” refers to advancement through the steps which lead to the generation and establishment of an immune response.

[0131] As used herein the term “immune sustenance” or “sustaining the immune response” refers to the advancement through steps which ensure the immune response is broadened and strengthened over time and which prevent dampening or suppression of the immune response. For example, these steps could include i.e., T cell trafficking, recognition of target cells though TCRs, and overcoming immune suppression, i.e., depletion or inhibition of T regulatory cells and preventing the establishment of other active suppression of the effector response.

[0132] Accordingly, in some embodiments, the genetically engineered bacteria are capable of producing one or more effector molecules, e.g., immune modulators, which modulate, e.g., intensify the initiation of the immune response. Accordingly, in some embodiments, the genetically engineered bacteria are capable of producing one or more effector molecules, e.g., immune modulators, which modulate, e.g., enhance, sustenance of the immune response. Accordingly, in some embodiments, the genetically engineered bacteria are capable of producing one or more effector molecules, e.g., immune modulators, which modulate, e.g., intensify, the initiation of the immune response and one or more one or more effector molecules, e.g., immune modulators, which modulate, e.g., enhance, sustenance of the immune response.

[0133] Accordingly, in some embodiments, the genetically engineered bacteria comprise gene sequences encoding one or more effector molecules, e.g., immune modulators, which modulate, e.g., intensify the initiation of the immune response. Accordingly, in some embodiments, the genetically engineered bacteria comprise gene sequences encoding one or more effector molecules, e.g., immune modulators, which modulate, e.g., enhance, sustenance of the immune response. Accordingly, in some embodiments, the genetically engineered bacteria comprise gene sequences encoding one or more effector molecules, e.g., immune modulators, which modulate, e.g., intensify, the initiation of the immune response and one or more one or more effector molecules, e.g., immune modulators, which modulate, e.g., enhance, sustenance of the immune response.

[0134] An “effector”, “effector substance” or “effector molecule” refers to one or more molecules, therapeutic substances, or drugs of interest. In one embodiment, the “effector” is produced by a modified microorganism, e.g., bacteria. In another embodiment, a modified microorganism capable of producing a first effector described herein is administered in combination with a second effector, e.g., a second effector not produced by a modified microorganism but administered before, at the same time as, or after, the administration of the modified microorganism producing the first effector.

[0135] A non-limiting example of such effector or effector molecules are “immune modulators,” which include immune sustainers and/or immune initiators as described herein. In some embodiments, the modified microorganism is capable of producing two or more effector molecules or immune modulators. In some embodiments, the modified microorganism is capable of producing three, four, five, six, seven, eight, nine, or ten effector molecules or immune modulators. In some embodiments, the effector molecule or immune modulator is a therapeutic molecule that is useful for preventing and/or treating a viral disease, e.g., the coronavirus disease 2019 (COVID-19). In another embodiment, a modified microorganism capable of producing a first immune modulator described herein is administered in combination with a second immune modulator, e.g., a second immune modulator not produced by a modified microorganism but administered before, at the same time as, or after, the administration of the modified microorganism producing the first immune modulator.

[0136] In some embodiments, the effector or immune modulator is a therapeutic molecule encoded by at least one gene. In other embodiments, the effector or immune modulator is a therapeutic molecule produced by an enzyme encoded by at least one gene. In alternate embodiments, the effector molecule or immune modulator is a therapeutic molecule produced by a biochemical or biosynthetic pathway encoded by at least one gene. In another embodiment, the effector molecule or immune modulator is at least one enzyme of a biochemical, biosynthetic, or catabolic pathway encoded by at least one gene. In some embodiments, the effector molecule or immune modulator may be a nucleic acid molecule that mediates RNA interference, microRNA response or inhibition, TLR response, antisense gene regulation, target protein binding (aptamer or decoy oligos), or gene editing, such as CRISPR interference. Other types of effectors and immune modulators are described and listed herein.

[0137] Non-limiting examples of effector molecules and/or immune modulators include immune checkpoint inhibitors (e.g., CTLA-4 antibodies, PD-1 antibodies, PDL-1 antibodies), cytotoxic agents (e.g., Cly A, FASL, TRAIL, TNFα), immunostimulatory cytokines and co-stimulatory molecules (e.g., OX40 antibody or OX40L, CD28, ICOS, CCL21, IL-2, IL-18, IL-15, IL-12, IFN-gamma, IL-21, TNFs, GM-CSF), antigens and antibodies (e.g., viral antigens, tumor antigens, neoantigens, CtxB-PSA fusion protein, CPV-OmpA fusion protein, NY-ESO-1 tumor antigen, RAF1, antibodies against immune suppressor molecules, anti-VEGF, Anti-CXR4/CXCL12, anti-GLP1, anti-GLP2, anti-galectin1, anti-galectin3, anti-Tie2, anti-CD47, antibodies against immune checkpoints, antibodies against immunosuppressive cytokines and chemokines), DNA transfer vectors (e.g., endostatin, thrombospondin-1, TRAIL, SMAC, Stat3, Bcl2, FLT3L, GM-CSF, IL-12, AFP, VEGFR2), and enzymes (e.g., E. coli CD, HSV-TK), immune stimulatory metabolites and biosynthetic pathway enzymes that produce them (STING agonists, e.g., c-di-AMP, 3′3′-cGAMP, and 2′3′-cGAMP; arginine, tryptophan).

[0138] Immune modulators include, inter alia, immune initiators and immune sustainers.

[0139] As used herein, the term “immune initiator” or “initiator” refers to a class of effectors or molecules, e.g., immune modulators, or substances. In one embodiment, an immune initiator may be produced by a modified microorganism, e.g., bacterium, described herein, or may be administered in combination with a modified microorganism of the disclosure. For example, a modified microorganism capable of producing a first immune initiator or immune sustainer described herein is administered in combination with a second immune initiator, e.g., a second immune initiator not produced by a modified microorganism but administered before, at the same time as, or after, the administration of the modified microorganism producing the first immune initiator or immune sustainer. Non-limiting examples of such immune initiators are described in further detail herein.

[0140] In some embodiments, an immune initiator is a therapeutic molecule encoded by at least one gene. Non-limiting examples of such therapeutic molecules are described herein and include, but are not limited to, cytokines, chemokines, single chain antibodies (agonistic or antagonistic), ligands (agonistic or antagonistic), co-stimulatory receptors/ligands and the like. In another embodiment, an immune initiator is a therapeutic molecule produced by an enzyme encoded by at least one gene. Non-limiting examples of such enzymes are described herein and include, but are not limited to, DacA and cGAS, which produce a STING agonist. In another embodiment, an immune initiator is at least one enzyme of a biosynthetic pathway encoded by at least one gene. Non-limiting examples of such biosynthetic pathways are described herein and include, but are not limited to, enzymes involved in the production of arginine. In another embodiment, an immune initiator is at least one enzyme of a catabolic pathway encoded by at least one gene. Non-limiting examples of such catabolic pathways are described herein and include, but are not limited to, enzymes involved in the catabolism of a harmful metabolite. In another embodiment, an immune initiator is at least one molecule produced by at least one enzyme of a biosynthetic pathway encoded by at least one gene. In another embodiment, an immune initiator is a therapeutic molecule produced by metabolic conversion, i.e., the immune initiator is a metabolic converter. In other embodiments, the immune initiator may be a nucleic acid molecule that mediates RNA interference, microRNA response or inhibition, TLR response, antisense gene regulation, target protein binding (aptamer or decoy oligos), gene editing, such as CRISPR interference.

[0141] The term “immune initiator” may also refer to any modifications, such as mutations or deletions, in endogenous genes. In some embodiments, the bacterium is engineered to express the biochemical, biosynthetic, or catabolic pathway. In some embodiments, the bacterium is engineered to produce a second messenger molecule.

[0142] As used herein, the term “low oxygen” is meant to refer to a level, amount, or concentration of oxygen (O₂) that is lower than the level, amount, or concentration of oxygen that is present in the atmosphere (e.g., <21% O₂; <160 torr O₂)). Thus, the term “low oxygen condition or conditions” or “low oxygen environment” refers to conditions or environments containing lower levels of oxygen than are present in the atmosphere.

[0143] In some embodiments, the term “low oxygen” is meant to refer to the level, amount, or concentration of oxygen (O₂) found in a mammalian gut, e.g., lumen, stomach, small intestine, duodenum, jejunum, ileum, large intestine, cecum, colon, distal sigmoid colon, rectum, and anal canal. In some embodiments, the term “low oxygen” is meant to refer to a level, amount, or concentration of 02 that is 0-60 mmHg 02 (0-60 torr O₂) (e.g., 0, 1, 2, 3, 4, 5, 6, 7, 8, 9, 10, 11, 12, 13, 14, 15, 16, 17, 18, 19, 20, 21, 22, 23, 24, 25, 26, 27, 28, 29, 30, 31, 32, 33, 34, 35, 36, 37, 38, 39, 40, 41, 42, 43, 44, 45, 46, 47, 48, 49, 50, 51, 52, 53, 54, 55, 56, 57, 58, 59, and 60 mmHg O₂), including any and all incremental fraction(s) thereof (e.g., 0.2 mmHg, 0.5 mmHg 02, 0.75 mmHg 02, 1.25 mmHg 02, 2.175 mmHg O₂, 3.45 mmHg O₂, 3.75 mmHg O₂, 4.5 mmHg O₂, 6.8 mmHg O₂, 11.35 mmHg 02, 46.3 mmHg O₂, 58.75 mmHg, etc., which exemplary fractions are listed here for illustrative purposes and not meant to be limiting in any way). In some embodiments, “low oxygen” refers to about 60 mmHg 02 or less (e.g., 0 to about 60 mmHg O₂). The term “low oxygen” may also refer to a range of 02 levels, amounts, or concentrations between 0-60 mmHg O₂ (inclusive), e.g., 0-5 mmHg O₂, <1.5 mmHg O₂, 6-10 mmHg, <8 mmHg, 47-60 mmHg, etc. which listed exemplary ranges are listed here for illustrative purposes and not meant to be limiting in any way. See, for example, Albenberg et al., Gastroenterology, 147(5): 1055-1063 (2014); Bergofsky et al., J Clin. Invest., 41(11): 1971-1980 (1962); Crompton et al., J Exp. Biol., 43: 473-478 (1965); He et al., PNAS (USA), 96: 4586-4591 (1999); McKeown, Br. J. Radiol., 87: 20130676 (2014) (doi: 10.1259/brj.20130676), each of which discusses the oxygen levels found in the mammalian gut of various species and each of which are incorporated by reference herewith in their entireties.

[0144] In some embodiments, the term “low oxygen” is meant to refer to the level, amount, or concentration of oxygen (O₂) found in a mammalian organ or tissue other than the gut, e.g., urogenital tract, tumor tissue, etc. in which oxygen is present at a reduced level, e.g., at a hypoxic or anoxic level. In some embodiments, “low oxygen” is meant to refer to the level, amount, or concentration of oxygen (O₂) present in partially aerobic, semi aerobic, microaerobic, nonaerobic, microoxic, hypoxic, anoxic, and/or anaerobic conditions. For example, Table 1 summarizes the amount of oxygen present in various organs and tissues. In some embodiments, the level, amount, or concentration of oxygen (O₂) is expressed as the amount of dissolved oxygen (“DO”) which refers to the level of free, non-compound oxygen (O₂) present in liquids and is typically reported in milligrams per liter (mg/L), parts per million (ppm; 1 mg/L=1 ppm), or in micromoles (umole) (1 umole O₂=0.022391 mg/L O₂). Fondriest Environmental, Inc., “Dissolved Oxygen”, Fundamentals of Environmental Measurements, 19 Nov. 2013, www.fondriest.com/environmental-measurements/parameters/water-quality/dissolved-oxygen/>.

[0145] In some embodiments, the term “low oxygen” is meant to refer to a level, amount, or concentration of oxygen (O₂) that is about 6.0 mg/L DO or less, e.g., 6.0 mg/L, 5.0 mg/L, 4.0 mg/L, 3.0 mg/L, 2.0 mg/L, 1.0 mg/L, or 0 mg/L, and any fraction therein, e.g., 3.25 mg/L, 2.5 mg/L, 1.75 mg/L, 1.5 mg/L, 1.25 mg/L, 0.9 mg/L, 0.8 mg/L, 0.7 mg/L, 0.6 mg/L, 0.5 mg/L, 0.4 mg/L, 0.3 mg/L, 0.2 mg/L and 0.1 mg/L DO, which exemplary fractions are listed here for illustrative purposes and not meant to be limiting in any way. The level of oxygen in a liquid or solution may also be reported as a percentage of air saturation or as a percentage of oxygen saturation (the ratio of the concentration of dissolved oxygen (O₂) in the solution to the maximum amount of oxygen that will dissolve in the solution at a certain temperature, pressure, and salinity under stable equilibrium). Well-aerated solutions (e.g., solutions subjected to mixing and/or stirring) without oxygen producers or consumers are 100% air saturated.

[0146] In some embodiments, the term “low oxygen” is meant to refer to 40% air saturation or less, e.g., 40%, 39%, 38%, 37%, 36%, 35%, 34%, 33%, 32%, 31%, 30%, 29%, 28%, 27%, 26%, 25%, 24%, 23%, 22%, 21%, 20%, 19%, 18%, 17%, 16%, 15%, 14%, 13%, 12%, 11%, 10%, 9%, 8%, 7%, 6%, 5%, 4%, 3%, 2%, 1%, and 0% air saturation, including any and all incremental fraction(s) thereof (e.g., 30.25%, 22.70%, 15.5%, 7.7%, 5.0%, 2.8%, 2.0%, 1.65%, 1.0%, 0.9%, 0.8%, 0.75%, 0.68%, 0.5%. 0.44%, 0.3%, 0.25%, 0.2%, 0.1%, 0.08%, 0.075%, 0.058%, 0.04%. 0.032%, 0.025%, 0.01%, etc.) and any range of air saturation levels between 0-40%, inclusive (e.g., 0-5%, 0.05-0.1%, 0.1-0.2%, 0.1-0.5%, 0.5-2.0%, 0-10%, 5-10%, 10-15%, 15-20%, 20-25%, 25-30%, etc.).

[0147] The exemplary fractions and ranges listed here are for illustrative purposes and not meant to be limiting in any way. In some embodiments, the term “low oxygen” is meant to refer to 9% O₂ saturation or less, e.g., 9%, 8%, 7%, 6%, 5%, 4%, 3%, 2%, 1%, 0%, O₂ saturation, including any and all incremental fraction(s) thereof (e.g., 6.5%, 5.0%, 2.2%, 1.7%, 1.4%, 0.9%, 0.8%, 0.75%, 0.68%, 0.5%. 0.44%, 0.3%, 0.25%, 0.2%, 0.1%, 0.08%, 0.075%, 0.058%, 0.04%. 0.032%, 0.025%, 0.01%, etc.) and any range of O₂ saturation levels between 0-9%, inclusive (e.g., 0-5%, 0.05-0.1%, 0.1-0.2%, 0.1-0.5%, 0.5-2.0%, 0-8%, 5-7%, 0.3-4.2% O₂, etc.). The exemplary fractions and ranges listed here are for illustrative purposes and not meant to be limiting in any way.

TABLE 1

| Compartment | Oxygen Tension |
|---|---|
| stomach | ~60 torr (e.g., 58 +/− 15 torr) |
| duodenum and first part of jejunum | ~30 torr (e.g., 32 +/− 8 torr); ~20% |
| | oxygen in ambient air |
| Ileum (mid- small intestine) | ~10 torr; ~6% oxygen in ambient air |
| | (e.g., 11 +/− 3 torr) |
| Distal sigmoid colon | ~ 3 torr (e.g., 3 +/− 1 torr) |
| colon | <2 torr |
| Lumen of cecum | <1 torr |
| tumor | <32 torr (most tumors are <15 torr) |

[0148] As used herein, the term “gene” or “gene sequence” refers to any sequence expressing a polypeptide or protein, including genomic sequences, cDNA sequences, naturally occurring sequences, artificial sequences, and codon optimized sequences. The term “gene” or “gene sequence” inter alia includes modification of endogenous genes, such as deletions, mutations, and expression of native and non-native genes under the control of a promoter that that they are not normally associated with in nature.

[0149] As used herein the terms “gene cassette” and “circuit” or “circuitry” inter alia refers to any sequence expressing a polypeptide or protein, including genomic sequences, cDNA sequences, naturally occurring sequences, artificial sequences, and codon optimized sequences includes modification of endogenous genes, such as deletions, mutations, and expression of native and non-native genes under the control of a promoter that that they are not normally associated with in nature.

[0150] An antibody generally refers to a polypeptide of the immunoglobulin family or a polypeptide comprising fragments of an immunoglobulin that is capable of noncovalently, reversibly, and in a specific manner binding a corresponding antigen. An exemplary antibody structural unit comprises a tetramer composed of two identical pairs of polypeptide chains, each pair having one “light” (about 25 kD) and one “heavy” chain (about 50-70 kD), connected through a disulfide bond.

[0151] As used herein, the term “antibody” or “antibodies” is meant to encompasses all variations of antibody and fragments thereof that possess one or more particular binding specificities. Thus, the term “antibody” or “antibodies” is meant to include full length antibodies, chimeric antibodies, humanized antibodies, single chain antibodies (ScFv, camelids), Fab, Fab′, multimeric versions of these fragments (e.g., F(ab′)2), single domain antibodies (sdAB, V_{H}H fragments), heavy chain antibodies (HCAb), nanobodies, diabodies, and minibodies. Antibodies can have more than one binding specificity, e.g. be bispecific. The term “antibody” is also meant to include so-called antibody mimetics, i.e., which can specifically bind antigens but do not have an antibody-related structure.

[0152] A “single-chain antibody” or “single-chain antibodies” typically refers to a peptide comprising a heavy chain of an immunoglobulin, a light chain of an immunoglobulin, and optionally a linker or bond, such as a disulfide bond. The single-chain antibody lacks the constant Fc region found in traditional antibodies. In some embodiments, the single-chain antibody is a naturally occurring single-chain antibody, e.g., a camelid antibody. In some embodiments, the single-chain antibody is a synthetic, engineered, or modified single-chain antibody. In some embodiments, the single-chain antibody is capable of retaining substantially the same antigen specificity as compared to the original immunoglobulin despite the addition of a linker and the removal of the constant regions. In some aspects, the single chain antibody can be a “scFv antibody”, which refers to a fusion protein of the variable regions of the heavy (VH) and light chains (VL) of immunoglobulins (without any constant regions), optionally connected with a short linker peptide of ten to about 25 amino acids, as described, for example, in U.S. Pat. No. 4,946,778, the contents of which is herein incorporated by reference in its entirety. The Fv fragment is the smallest fragment that holds a binding site of an antibody, which binding site may, in some aspects, maintain the specificity of the original antibody. Techniques for the production of single chain antibodies are described in U.S. Pat. No. 4,946,778.

[0153] As used herein, the term “polypeptide” includes “polypeptide” as well as “polypeptides,” and refers to a molecule composed of amino acid monomers linearly linked by amide bonds (i.e., peptide bonds). The term “polypeptide” refers to any chain or chains of two or more amino acids, and does not refer to a specific length of the product. Thus, “peptides,” “dipeptides,” “tripeptides, “oligopeptides,” “protein,” “amino acid chain,” or any other term used to refer to a chain or chains of two or more amino acids, are included within the definition of “polypeptide,” and the term “polypeptide” may be used instead of, or interchangeably with any of these terms. The term “polypeptide” is also intended to refer to the products of post-expression modifications of the polypeptide, including but not limited to glycosylation, acetylation, phosphorylation, amidation, derivatization, proteolytic cleavage, or modification by non-naturally occurring amino acids. In some embodiments, the polypeptide is produced by the genetically engineered bacteria of the current invention. A polypeptide of the invention may be of a size of about 3 or more, 5 or more, 10 or more, 20 or more, 25 or more, 50 or more, 75 or more, 100 or more, 200 or more, 500 or more, 1,000 or more, or 2,000 or more amino acids.

[0154] An “isolated” polypeptide or a fragment, variant, or derivative thereof refers to a polypeptide that is not in its natural milieu. No particular level of purification is required. Recombinantly produced polypeptides and proteins expressed in host cells, including but not limited to bacterial or mammalian cells, are considered isolated for purposed of the invention, as are native or recombinant polypeptides which have been separated, fractionated, or partially or substantially purified by any suitable technique. Recombinant peptides, polypeptides or proteins refer to peptides, polypeptides or proteins produced by recombinant DNA techniques, i.e. produced from cells, microbial or mammalian, transformed by an exogenous recombinant DNA expression construct encoding the polypeptide. Proteins or peptides expressed in most bacterial cultures will typically be free of glycan. Fragments, derivatives, analogs or variants of the foregoing polypeptides, and any combination thereof are also included as polypeptides. The terms “fragment,” “variant,” “derivative” and “analog” include polypeptides having an amino acid sequence sufficiently similar to the amino acid sequence of the original peptide and include any polypeptides, which retain at least one or more properties of the corresponding original polypeptide. Fragments of polypeptides of the present invention include proteolytic fragments, as well as deletion fragments. Fragments also include specific antibody or bioactive fragments or immunologically active fragments derived from any polypeptides described herein. Variants may occur naturally or be non-naturally occurring. Non-naturally occurring variants may be produced using mutagenesis methods known in the art. Variant polypeptides may comprise conservative or non-conservative amino acid substitutions, deletions or additions.

[0155] Polypeptides also include fusion proteins. As used herein, the term “variant” includes a fusion protein, which comprises a sequence of the original peptide or sufficiently similar to the original peptide. As used herein, the term “fusion protein” refers to a chimeric protein comprising amino acid sequences of two or more different proteins. Typically, fusion proteins result from well known in vitro recombination techniques. Fusion proteins may have a similar structural function (but not necessarily to the same extent), and/or similar regulatory function (but not necessarily to the same extent), and/or similar biochemical function (but not necessarily to the same extent) and/or immunological activity (but not necessarily to the same extent) as the individual original proteins which are the components of the fusion proteins. “Derivatives” include but are not limited to peptides, which contain one or more naturally occurring amino acid derivatives of the twenty standard amino acids. “Similarity” between two peptides is determined by comparing the amino acid sequence of one peptide to the sequence of a second peptide. An amino acid of one peptide is similar to the corresponding amino acid of a second peptide if it is identical or a conservative amino acid substitution. Conservative substitutions include those described in Dayhoff, M. O., ed., The Atlas of Protein Sequence and Structure 5, National Biomedical Research Foundation, Washington, D.C. (1978), and in Argos, EMBO J. 8 (1989), 779-785. For example, amino acids belonging to one of the following groups represent conservative changes or substitutions: Ala, Pro, Gly, Gln, Asn, Ser, Thr; Cys, Ser, Tyr, Thr; Val, Ile, Leu, Met, Ala, Phe; Lys, Arg, His; Phe, Tyr, Trp, His; and Asp, Glu.

[0156] As used herein, the term “sufficiently similar” means a first amino acid sequence that contains a sufficient or minimum number of identical or equivalent amino acid residues relative to a second amino acid sequence such that the first and second amino acid sequences have a common structural domain and/or common functional activity. For example, amino acid sequences that comprise a common structural domain that is at least about 45%, at least about 50%, at least about 55%, at least about 60%, at least about 65%, at least about 70%, at least about 75%, at least about 80%, at least about 85%, at least about 90%, at least about 91%, at least about 92%, at least about 93%, at least about 94%, at least about 95%, at least about 96%, at least about 97%, at least about 98%, at least about 99%, or at least about 100%, identical are defined herein as sufficiently similar. Preferably, variants will be sufficiently similar to the amino acid sequence of the peptides of the invention. Such variants generally retain the functional activity of the peptides of the present invention. Variants include peptides that differ in amino acid sequence from the native and wild-type peptide, respectively, by way of one or more amino acid deletion(s), addition(s), and/or substitution(s). These may be naturally occurring variants as well as artificially designed ones.

[0157] As used herein the term “linker”, “linker peptide” or “peptide linkers” or “linker” refers to synthetic or non-native or non-naturally-occurring amino acid sequences that connect or link two polypeptide sequences, e.g., that link two polypeptide domains. As used herein the term “synthetic” refers to amino acid sequences that are not naturally occurring. Exemplary linkers are described herein. Additional exemplary linkers are provided in US 20140079701, the contents of which are herein incorporated by reference in its entirety. In some embodiments, the linker is a glycine rich linker. In some embodiments, the linker is (Gly-Gly-Gly-Gly-Ser)n (SEQ ID NO: 1477). In some embodiments, the linker comprises SEQ ID NO: 979.

[0158] As used herein the term “codon-optimized sequence” refers to a sequence, which was modified from an existing coding sequence, or designed, for example, to improve translation in an expression host cell or organism of a transcript RNA molecule transcribed from the coding sequence, or to improve transcription of a coding sequence. Codon optimization includes, but is not limited to, processes including selecting codons for the coding sequence to suit the codon preference of the expression host organism.

[0159] Many organisms display a bias or preference for use of particular codons to code for insertion of a particular amino acid in a growing polypeptide chain. Codon preference or codon bias, differences in codon usage between organisms, is allowed by the degeneracy of the genetic code, and is well documented among many organisms. Codon bias often correlates with the efficiency of translation of messenger RNA (mRNA), which is in turn believed to be dependent on, inter alia, the properties of the codons being translated and the availability of particular transfer RNA (tRNA) molecules. The predominance of selected tRNAs in a cell is generally a reflection of the codons used most frequently in peptide synthesis. Accordingly, genes can be tailored for optimal gene expression in a given organism based on codon optimization.

[0160] As used herein, the terms “secretion system” or “secretion protein” refers to a native or non-native secretion mechanism capable of secreting or exporting the immune modulator from the microbial, e.g., bacterial cytoplasm. Non-limiting examples of secretion systems for gram negative bacteria include the modified type III flagellar, type I (e.g., hemolysin secretion system), type II, type IV, type V, type VI, and type VII secretion systems, resistance-nodulation-division (RND) multi-drug efflux pumps, various single membrane secretion systems. Non-limiting examples of secretion systems are described herein.

[0161] As used herein, the term “transporter” is meant to refer to a mechanism, e.g., protein or proteins, for importing a molecule into the microorganism from the extracellular milieu.

[0162] The immune system is typically most broadly divided into two categories—innate immunity and adaptive immunity—although the immune responses associated with these immunities are not mutually exclusive. “Innate immunity” refers to non-specific defense mechanisms that are activated immediately or within hours of a foreign agent's or antigen's appearance in the body. These mechanisms include physical barriers such as skin, chemicals in the blood, and immune system cells, such as dendritic cells (DCs), leukocytes, phagocytes, macrophages, neutrophils, and natural killer cells (NKs), that attack foreign agents or cells in the body and alter the rest of the immune system to the presence of the foreign agents. During an innate immune response, cytokines and chemokines are produced which in combination with the presentation of immunological antigens, work to activate adaptive immune cells and initiate a full blown immunologic response. “Adaptive immunity” or “acquired immunity” refers to antigen-specific immune response. The antigen must first be processed or presented by antigen presenting cells (APCs). An antigen-presenting cell or accessory cell is a cell that displays antigens directly or complexed with major histocompatibility complexes (MHCs) on their surfaces. Professional antigen-presenting cells, including macrophages, B cells, and dendritic cells, specialize in presenting foreign antigen to T helper cells in a MHC-II restricted manner, while other cell types can present antigen originating inside the cell to cytotoxic T cells in a MHC-L restricted manner. Once an antigen has been presented and recognized, the adaptive immune system activates an army of immune cells specifically designed to attack that antigen. Like the innate system, the adaptive system includes both humoral immunity components (B lymphocyte cells) and cell-mediated immunity (T lymphocyte cells) components. B cells are activated to secrete antibodies, which travel through the bloodstream and bind to the foreign antigen. Helper T cells (regulatory T cells, CD4+ cells) and cytotoxic T cells (CTL, CD8+ cells) are activated when their T cell receptor interacts with an antigen-bound MHC molecule. Cytokines and co-stimulatory molecules help the T cells mature, which mature cells, in turn, produce cytokines which allows the production of priming and expansion of additional T cells sustaining the response. Once activated, the helper T cells release cytokines which regulate and direct the activity of different immune cell types, including APCs, macrophages, neutrophils, and other lymphocytes, to kill and remove targeted cells. Helper T cells also secrete extra signals that assist in the activation of cytotoxic T cells which also help to sustain the immune response. Upon activation, CTL undergoes clonal selection, in which it gains functions, divides rapidly to produce an army of activated effector cells, and forms long-lived memory T cells ready to rapidly respond to future threats. Activated CTL then travels throughout the body searching for cells that bear that unique MHC Class I and antigen. The effector CTLs release cytotoxins that form pores in the target cell's plasma membrane, causing apoptosis. Adaptive immunity also includes a “memory” that makes future responses against a specific antigen more efficient. Upon resolution of the infection, T helper cells and cytotoxic T cells die and are cleared away by phagocytes, however, a few of these cells remain as memory cells. If the same antigen is encountered at a later time, these memory cells quickly differentiate into effector cells, shortening the time required to mount an effective response.

[0163] An “immune checkpoint inhibitor” or “immune checkpoint” refers to a molecule that completely or partially reduces, inhibits, interferes with, or modulates one or more immune checkpoint proteins. Immune checkpoint proteins regulate T-cell activation or function, and are known in the art. Non-limiting examples include CTLA-4 and its ligands CD 80 and CD86, and PD-1 and its ligands PD-L1 and PD-L2. Immune checkpoint proteins are responsible for co-stimulatory or inhibitory interactions of T-cell responses, and regulate and maintain self-tolerance and physiological immune responses.

[0164] A “co-stimulatory” molecule or “co-stimulator” is an immune modulator that increase or activates a signal that stimulates an immune response or inflammatory response.

[0165] Examples of bacteria suitable for the methods and compositions in the present invention include, but are not limited to, Bifidobacterium, Caulobacter, Clostridium, Escherichia coli, Listeria, Mycobacterium, Salmonella, Streptococcus, and Vibrio, e.g., Bifidobacterium adolescentis, Bifidobacterium bifidum, Bifidobacterium breve UCC2003, Bifidobacterium infantis, Bifidobacterium longum, Clostridium acetobutylicum, Clostridium butyricum, Clostridium butyricum M-55, Clostridium butyricum miyairi, Clostridium cochlearum, Clostridium felsineum, Clostridium histolyticum, Clostridium multifermentans, Clostridium novyi-NT, Clostridium paraputrificum, Clostridium pasteureanum, Clostridium pectinovorum, Clostridium perfringens, Clostridium roseum, Clostridium sporogenes, Clostridium tertium, Clostridium tetani, Clostridium tyrobutyricum, Corynebacterium parvum, Escherichia coli MG1655, Escherichia coli Nissle 1917, Listeria monocytogenes, Mycobacterium bovis, Salmonella choleraesuis, Salmonella typhimurium, and Vibrio cholera (Cronin et al., 2012; Forbes, 2006; Jain and Forbes, 2001; Liu et al., 2014; Morrissey et al., 2010; Nuno et al., 2013; Patyar et al., 2010; Cronin, et al., Mol Ther 2010; 18:1397-407).

[0166] “Microorganism” refers to an organism or microbe of microscopic, submicroscopic, or ultramicroscopic size that typically consists of a single cell. Examples of microorganisms include bacteria, viruses, parasites, fungi, certain algae, protozoa, and yeast. In some aspects, the microorganism is modified (“modified microorganism”) from its native state to produce one or more effectors or immune modulators. In certain embodiments, the modified microorganism is a modified bacterium. In some embodiments, the modified microorganism is a genetically engineered bacterium. In certain embodiments, the modified microorganism is a modified yeast. In other embodiments, the modified microorganism is a genetically engineered yeast.

[0167] As used herein, the term “recombinant microorganism” refers to a microorganism, e.g., bacterial, yeast, or viral cell, or bacteria, yeast, or virus, that has been genetically modified from its native state. Thus, a “recombinant bacterial cell” or “recombinant bacteria” refers to a bacterial cell or bacteria that have been genetically modified from their native state. For instance, a recombinant bacterial cell may have nucleotide insertions, nucleotide deletions, nucleotide rearrangements, and nucleotide modifications introduced into their DNA. These genetic modifications may be present in the chromosome of the bacteria or bacterial cell, or on a plasmid in the bacteria or bacterial cell. Recombinant bacterial cells disclosed herein may comprise exogenous nucleotide sequences on plasmids. Alternatively, recombinant bacterial cells may comprise exogenous nucleotide sequences stably incorporated into their chromosome.

[0168] A “programmed or engineered microorganism” refers to a microorganism, e.g., bacterial, yeast, or viral cell, or bacteria, yeast, or virus, that has been genetically modified from its native state to perform a specific function. Thus, a “programmed or engineered bacterial cell” or “programmed or engineered bacteria” refers to a bacterial cell or bacteria that has been genetically modified from its native state to perform a specific function. In certain embodiments, the programmed or engineered bacterial cell has been modified to express one or more proteins, for example, one or more proteins that have a therapeutic activity or serve a therapeutic purpose. The programmed or engineered bacterial cell may additionally have the ability to stop growing or to destroy itself once the protein(s) of interest have been expressed.

[0169] “Non-pathogenic bacteria” refer to bacteria that are not capable of causing disease or harmful responses in a host. In some embodiments, non-pathogenic bacteria are Gram-negative bacteria. In some embodiments, non-pathogenic bacteria are Gram-positive bacteria. In some embodiments, non-pathogenic bacteria do not contain lipopolysaccharides (LPS). In some embodiments, non-pathogenic bacteria are commensal bacteria. Examples of non-pathogenic bacteria include, but are not limited to certain strains belonging to the genus Bacillus, Bacteroides, Bifidobacterium, Brevibacteria, Clostridium, Enterococcus, Escherichia coli, Lactobacillus, Lactococcus, Saccharomyces, and Staphylococcus, e.g., Bacillus coagulans, Bacillus subtilis, Bacteroides fragilis, Bacteroides subtilis, Bacteroides thetaiotaomicron, Bifidobacterium bifidum, Bifidobacterium infantis, Bifidobacterium lactis, Bifidobacterium longum, Clostridium butyricum, Enterococcus faecium, Escherichia coli Nissle, Lactobacillus acidophilus, Lactobacillus bulgaricus, Lactobacillus casei, Lactobacillus johnsonii, Lactobacillus paracasei, Lactobacillus plantarum, Lactobacillus reuteri, Lactobacillus rhamnosus, Lactococcus lactis, and Saccharomyces boulardii (Sonnenborn et al., 2009; Dinleyici et al., 2014; U.S. Pat. Nos. 6,835,376; 6,203,797; 5,589,168; 7,731,976). Naturally pathogenic bacteria may be genetically engineered to provide reduce or eliminate pathogenicity.

[0170] “Probiotic” is used to refer to live, non-pathogenic microorganisms, e.g., bacteria, which can confer health benefits to a host organism that contains an appropriate amount of the microorganism. In some embodiments, the host organism is a mammal. In some embodiments, the host organism is a human. In some embodiments, the probiotic bacteria are Gram-negative bacteria. In some embodiments, the probiotic bacteria are Gram-positive bacteria. Some species, strains, and/or subtypes of non-pathogenic bacteria are currently recognized as probiotic bacteria. Examples of probiotic bacteria include, but are not limited to certain strains belonging to the genus Bifidobacteria, Escherichia coli, Lactobacillus, and Saccharomyces, e.g., Bifidobacterium bifidum, Enterococcus faecium, Escherichia coli strain Nissle, Lactobacillus acidophilus, Lactobacillus bulgaricus, Lactobacillus paracasei, Lactobacillus plantarum, and Saccharomyces boulardii (Dinleyici et al., 2014; U.S. Pat. Nos. 5,589,168; 6,203,797; 6,835,376). The probiotic may be a variant or a mutant strain of bacterium (Arthur et al., 2012; Cuevas-Ramos et al., 2010; Olier et al., 2012; Nougayrede et al., 2006). Non-pathogenic bacteria may be genetically engineered to enhance or improve desired biological properties, e.g., survivability. Non-pathogenic bacteria may be genetically engineered to provide probiotic properties. Probiotic bacteria may be genetically engineered or programmed to enhance or improve probiotic properties.

[0171] “Operably linked” refers a nucleic acid sequence, e.g., a gene encoding an enzyme for the production of a STING agonist, e.g., a diadenylate cyclase or a c-di-GAMP synthase, that is joined to a regulatory region sequence in a manner which allows expression of the nucleic acid sequence, e.g., acts in cis. A regulatory region is a nucleic acid that can direct transcription of a gene of interest and may comprise promoter sequences, enhancer sequences, response elements, protein recognition sites, inducible elements, promoter control elements, protein binding sequences, 5′ and 3′ untranslated regions, transcriptional start sites, termination sequences, polyadenylation sequences, and introns.

[0172] An “inducible promoter” refers to a regulatory region that is operably linked to one or more genes, wherein expression of the gene(s) is increased in the presence of an inducer of said regulatory region.

[0173] “Exogenous environmental condition(s)” refer to setting(s) or circumstance(s) under which the promoter described herein is induced. The phrase “exogenous environmental conditions” is meant to refer to the environmental conditions external to the intact (unlysed) engineered microorganism, but endogenous or native to environment or the host subject environment. Thus, “exogenous” and “endogenous” may be used interchangeably to refer to environmental conditions in which the environmental conditions are endogenous to a mammalian body, but external or exogenous to an intact microorganism cell. In some embodiments, the exogenous environmental conditions are low-oxygen, microaerobic, or anaerobic conditions, such as hypoxic and/or necrotic tissues. In some embodiments, the genetically engineered microorganism of the disclosure comprise an oxygen level-dependent promoter. In some aspects, bacteria have evolved transcription factors that are capable of sensing oxygen levels. Different signaling pathways may be triggered by different oxygen levels and occur with different kinetics. An “oxygen level-dependent promoter” or “oxygen level-dependent regulatory region” refers to a nucleic acid sequence to which one or more oxygen level-sensing transcription factors is capable of binding, wherein the binding and/or activation of the corresponding transcription factor activates downstream gene expression.

[0174] Examples of oxygen level-dependent transcription factors include, but are not limited to, FNR (fumarate and nitrate reductase), ANR, and DNR. Corresponding FNR-responsive promoters, ANR (anaerobic nitrate respiration)-responsive promoters, and DNR (dissimilatory nitrate respiration regulator)-responsive promoters are known in the art (see, e.g., Castiglione et al., 2009; Eiglmeier et al., 1989; Galimand et al., 1991; Hasegawa et al., 1998; Hoeren et al., 1993; Salmon et al., 2003), and non-limiting examples are shown in Table 2.

[0175] In a non-limiting example, a promoter (PfnrS) was derived from the E. coli Nissle fumarate and nitrate reductase gene S (fnrS) that is known to be highly expressed under conditions of low or no environmental oxygen (Durand and Storz, 2010; Boysen et al, 2010). The PfnrS promoter is activated under anaerobic conditions by the global transcriptional regulator FNR that is naturally found in Nissle. Under anaerobic conditions, FNR forms a dimer and binds to specific sequences in the promoters of specific genes under its control, thereby activating their expression. However, under aerobic conditions, oxygen reacts with iron-sulfur clusters in FNR dimers and converts them to an inactive form. In this way, the PfnrS inducible promoter is adopted to modulate the expression of proteins or RNA. PfnrS is used interchangeably in this application as FNRS, fnrs, FNR, P-FNRS promoter and other such related designations to indicate the promoter PfnrS.

TABLE 2
Examples of transcription factors and
responsive genes and regulatory regions

| Transcription | Examples of responsive genes, promoters, |
|---|---|
| Factor | and/or regulatory regions: |
| FNR | nirB, ydfZ, pdhR, focA, ndH, hlyE, narK, narX, |
| | narG, yfiD, tdcD |
| ANR | arcDABC |
| DNR | norb, norC |

[0176] As used herein, a “non-native” nucleic acid sequence refers to a nucleic acid sequence not normally present in a microorganism, e.g., an extra copy of an endogenous sequence, or a heterologous sequence such as a sequence from a different species, strain, or substrain of bacteria or virus, or a sequence that is modified and/or mutated as compared to the unmodified sequence from bacteria or virus of the same subtype. In some embodiments, the non-native nucleic acid sequence is a synthetic, non-naturally occurring sequence (see, e.g., Purcell et al., 2013). The non-native nucleic acid sequence may be a regulatory region, a promoter, a gene, and/or one or more genes in gene cassette. In some embodiments, “non-native” refers to two or more nucleic acid sequences that are not found in the same relationship to each other in nature. The non-native nucleic acid sequence may be present on a plasmid or chromosome. In some embodiments, the genetically engineered bacteria of the disclosure comprise a gene that is operably linked to a directly or indirectly inducible promoter that is not associated with said gene in nature, e.g., an FNR-responsive promoter (or other promoter described herein) operably linked to a gene encoding an immune modulator.

[0177] In one embodiment, the effector, or immune modulator, is a therapeutic molecule encoded by at least one non-native gene. In one embodiment, the effector, or immune modulator, is a therapeutic molecule produced by an enzyme encoded by at least one non-native gene. In one embodiment, the effector, or immune modulator, is at least one enzyme of a biosynthetic pathway encoded by at least one non-native gene. In another embodiment, the effector, or immune modulator, is at least one molecule produced by at least one enzyme of a biosynthetic pathway encoded by at least one non-native gene.

[0178] In one embodiment, the immune initiator is a therapeutic molecule encoded by at least one non-native gene. In one embodiment, the immune initiator is a therapeutic molecule produced by an enzyme encoded by at least one non-native gene. In one embodiment, the immune initiator is at least one enzyme of a biosynthetic pathway encoded by at least one non-native gene. In another embodiment, the immune initiator is at least one molecule produced by at least one enzyme of a biosynthetic pathway encoded by at least one non-native gene.

[0179] In one embodiment, the immune sustainer is a therapeutic molecule encoded by at least one non-native gene. In one embodiment, the immune sustainer is a therapeutic molecule produced by an enzyme encoded by at least one non-native gene. In one embodiment, the immune sustainer is at least one enzyme of a biosynthetic pathway encoded by at least one non-native gene. In another embodiment, the immune sustainer is at least one molecule produced by at least one enzyme of a biosynthetic pathway encoded by at least one non-native gene.

[0180] “Constitutive promoter” refers to a promoter that is capable of facilitating continuous transcription of a coding sequence or gene under its control and/or to which it is operably linked. Constitutive promoters and variants are well known in the art and non-limiting examples of constitutive promoters are described herein and in International Patent Application PCT/US2017/013072, filed Jan. 11, 2017 and published as WO2017/123675, the contents of which is herein incorporated by reference in its entirety. In some embodiments, such promoters are active in vitro, e.g., under culture, expansion and/or manufacture conditions. In some embodiments, such promoters are active in vivo, e.g., in conditions found in the in vivo environment, e.g., the gut and/or the microenvironment.

[0181] As used herein, “stably maintained” or “stable” bacterium or virus is used to refer to a bacterial or viral host cell carrying non-native genetic material, e.g., an immune modulator, such that the non-native genetic material is retained, expressed, and propagated. The stable bacterium or virus is capable of survival and/or growth in vitro, e.g., in medium, and/or in vivo, e.g., in hypoxic and/or necrotic tissues. For example, the stable bacterium or virus may be a genetically engineered bacterium comprising non-native genetic material encoding an immune modulator, in which the plasmid or chromosome carrying the non-native genetic material is stably maintained in the bacterium or virus, such that the immune modulator can be expressed in the bacterium or virus, and the bacterium or virus is capable of survival and/or growth in vitro and/or in vivo.

[0182] As used herein, the terms “modulate” and “treat” and their cognates refer to an amelioration of a viral infection, e.g., the coronavirus disease 2019 (COVID-19), or at least one discernible symptom thereof. In another embodiment, “modulate” and “treat” refer to an amelioration of at least one measurable physical parameter, not necessarily discernible by the patient. The symptoms for patients with COVID-19 vary depending on how serious the infection is. Patients with a mild to moderate upper-respiratory infection may develop symptoms such as runny nose, sneezing, headache, cough, sore throat, fever, or short of breath. In more severe cases, coronavirus infection can cause pneumonia, severe acute respiratory syndrome, kidney failure and even death. Further details regarding signs and symptoms of the various diseases or conditions are provided herein and are well known in the art. In another embodiment, “modulate” and “treat” refer to inhibiting the development of COVID-19, either physically (e.g., stabilization of a discernible symptom), physiologically (e.g., stabilization of a physical parameter), or both. In another embodiment, “modulate” and “treat” refer to slowing the development or reversing the development of COVID-19. As used herein, “prevent” and its cognates refer to delaying the onset or reducing the risk of acquiring a given disease.

[0183] Those in need of treatment may include individuals already having a particular viral infection, as well as those at risk of having, or who may ultimately acquire the COVID-19. The need for treatment is assessed, for example, by the presence of one or more risk factors associated with the development of a viral infection, the presence or progression of a viral infection, or likely receptiveness to treatment of a subject having the viral infection.

[0184] As used herein, the term “conventional anti-viral treatment” or “conventional anti-viral therapy” refers to treatment or therapy that is widely accepted and used by most healthcare professionals. It is different from alternative or complementary therapies, which are not as widely used.

[0185] As used herein a “pharmaceutical composition” refers to a preparation of genetically engineered microorganism of the disclosure with other components such as a physiologically suitable carrier and/or excipient.

[0186] The phrases “physiologically acceptable carrier” and “pharmaceutically acceptable carrier” which may be used interchangeably refer to a carrier or a diluent that does not cause significant irritation to an organism and does not abrogate the biological activity and properties of the administered bacterial or viral compound. An adjuvant is included under these phrases.

[0187] The term “excipient” refers to an inert substance added to a pharmaceutical composition to further facilitate administration of an active ingredient. Examples include, but are not limited to, calcium bicarbonate, calcium phosphate, various sugars and types of starch, cellulose derivatives, gelatin, vegetable oils, polyethylene glycols, and surfactants, including, for example, polysorbate 20.

[0188] The terms “therapeutically effective dose” and “therapeutically effective amount” are used to refer to an amount of a compound that results in prevention, delay of onset of symptoms, or amelioration of symptoms of a condition. A therapeutically effective amount may, for example, be sufficient to treat, prevent, reduce the severity, delay the onset, and/or reduce the risk of occurrence of one or more symptoms of a disorder. A therapeutically effective amount, as well as a therapeutically effective frequency of administration, can be determined by methods known in the art and discussed below.

[0189] In some embodiments, the term “therapeutic molecule” refers to a molecule or a compound that is results in prevention, delay of onset of symptoms, or amelioration of symptoms of a condition. In some embodiments, a therapeutic molecule may be, for example, a cytokine, a chemokine, a single chain antibody, a ligand, a metabolic converter, e.g., arginine, a kynurenine consumer, or an adenosine consumer, a T cell co-stimulatory receptor, a T cell co-stimulatory receptor ligand, an engineered chemotherapy, or a lytic peptide, among others.

[0190] The articles “a” and “an,” as used herein, should be understood to mean “at least one,” unless clearly indicated to the contrary.

[0191] The phrase “and/or,” when used between elements in a list, is intended to mean either (1) that only a single listed element is present, or (2) that more than one element of the list is present. For example, “A, B, and/or C” indicates that the selection may be A alone; B alone; C alone; A and B; A and C; B and C; or A, B, and C. The phrase “and/or” may be used interchangeably with “at least one of” or “one or more of” the elements in a list.

### Bacteria

[0192] In one embodiment, the modified microorganism may be a bacterium, e.g., a genetically engineered bacterium. The modified microorganism, or genetically engineered microorganisms, such as the modified bacterium of the disclosure is capable of target-specific delivery of viral antigens and/or an immune modulator, such as a STING agonist, to a cell or host. The engineered bacteria may be administered systemically, orally, locally and/or intratumorally. In some embodiments, the genetically engineered bacteria are capable of producing a viral antigen, and producing an effector molecule, e.g., an immune modulator, e.g., immune stimulator or sustainer provided herein.

[0193] In certain embodiments, the modified microorganisms or genetically engineered bacteria are obligate anaerobic bacteria. In certain embodiments, the genetically engineered bacteria are facultative anaerobic bacteria. In certain embodiments, the genetically engineered bacteria are aerobic bacteria. In some embodiments, the genetically engineered bacteria are Gram-positive bacteria and lack LPS. In some embodiments, the genetically engineered bacteria are Gram-negative bacteria. In some embodiments, the genetically engineered bacteria are Gram-positive and obligate anaerobic bacteria. In some embodiments, the genetically engineered bacteria are Gram-positive and facultative anaerobic bacteria. In some embodiments, the genetically engineered bacteria are non-pathogenic bacteria. In some embodiments, the genetically engineered bacteria are commensal bacteria. In some embodiments, the genetically engineered bacteria are probiotic bacteria. In some embodiments, the genetically engineered bacteria are naturally pathogenic bacteria that are modified or mutated to reduce or eliminate pathogenicity. Exemplary bacteria include, but are not limited to, Bacillus, Bacteroides, Bifidobacterium, Brevibacteria, Caulobacter, Clostridium, Enterococcus, Escherichia coli, Lactobacillus, Lactococcus, Listeria, Mycobacterium, Saccharomyces, Salmonella, Staphylococcus, Streptococcus, Vibrio, Bacillus coagulans, Bacillus subtilis, Bacteroides fragilis, Bacteroides subtilis, Bacteroides thetaiotaomicron, Bifidobacterium adolescentis, Bifidobacterium bifidum, Bifidobacterium breve UCC2003, Bifidobacterium infantis, Bifidobacterium lactis, Bifidobacterium longum, Clostridium acetobutylicum, Clostridium butyricum, Clostridium butyricum M-55, Clostridium butyricum miyairi, Clostridium cochlearum, Clostridium felsineum, Clostridium histolyticum, Clostridium multifermentans, Clostridium novyi-NT, Clostridium paraputrificum, Clostridium pasteureanum, Clostridium pectinovorum, Clostridium perfringens, Clostridium roseum, Clostridium sporogenes, Clostridium tertium, Clostridium tetani, Clostridium tyrobutyricum, Corynebacterium parvum, Escherichia coli MG1655, Escherichia coli Nissle 1917, Listeria monocytogenes, Mycobacterium bovis, Salmonella choleraesuis, Salmonella typhimurium, Vibrio cholera, and the bacteria shown in Table 3. In certain embodiments, the genetically engineered bacteria are selected from the group consisting of Enterococcus faecium, Lactobacillus acidophilus, Lactobacillus bulgaricus, Lactobacillus casei, Lactobacillus johnsonii, Lactobacillus paracasei, Lactobacillus plantarum, Lactobacillus reuteri, Lactobacillus rhamnosus, Lactococcus lactis, and Saccharomyces boulardii. In certain embodiments, the genetically engineered bacteria are selected from the group consisting of Bacteroides fragilis, Bacteroides thetaiotaomicron, Bacteroides subtilis, Bifidobacterium bifidum, Bifidobacterium infantis, Bifidobacterium lactis, Clostridium butyricum, Escherichia coli Nissle, Lactobacillus acidophilus, Lactobacillus plantarum, Lactobacillus reuteri, and Lactococcus lactis. In some embodiments, Lactobacillus is used for delivery of one or more immune modulators.

[0194] In some embodiments, the genetically engineered bacteria are obligate anaerobes. In some embodiments, the genetically engineered bacteria are Clostridia and capable of delivery of immune modulators. In some embodiments, the genetically engineered bacteria is selected from the group consisting of Clostridium novyi-NT, Clostridium histolyticium, Clostridium tetani, Clostridium oncolyticum, Clostridium sporogenes, and Clostridium beijerinckii (Liu et al., 2014). In some embodiments, the Clostridium is naturally non-pathogenic. In alternate embodiments, the Clostridium is naturally pathogenic but modified to reduce or eliminate pathogenicity. For example, Clostridium novyi are naturally pathogenic, and Clostridium novyi-NT are modified to remove lethal toxins. Clostridium novyi-NT and Clostridium sporogenes have been used to deliver single-chain HIF-1α antibodies to treat cancer (Groot et al., 2007).

[0195] In some embodiments, the genetically engineered bacteria facultative anaerobes. In some embodiments, the genetically engineered bacteria are Salmonella, e.g., Salmonella typhimurium, and are capable of tumor-specific delivery of immune modulators. Salmonella are non-spore-forming Gram-negative bacteria that are facultative anaerobes. In some embodiments, the Salmonella are naturally pathogenic but modified to reduce or eliminate pathogenicity. For example, Salmonella typhimurium is modified to remove pathogenic sites (attenuated). In some embodiments, the genetically engineered bacteria are Bifidobacterium and capable of immune modulators. Bifidobacterium are Gram-positive, branched anaerobic bacteria. In some embodiments, the Bifidobacterium is naturally non-pathogenic. In alternate embodiments, the Bifidobacterium is naturally pathogenic but modified to reduce or eliminate pathogenicity. Bifidobacterium and Salmonella have been shown to preferentially target and replicate in the hypoxic and necrotic regions of tumors (Yu et al., 2014).

[0196] In some embodiments, the genetically engineered bacteria are Gram-negative bacteria. In some embodiments, the genetically engineered bacteria are E. coli. In some embodiments, the genetically engineered bacteria are Escherichia coli strain Nissle 1917 (E. coli Nissle), a Gram-negative bacterium of the Enterobacteriaceae family that “has evolved into one of the best characterized probiotics” (Ukena et al., 2007). The strain is characterized by its complete harmlessness (Schultz, 2008), and has GRAS (generally recognized as safe) status (Reister et al., 2014, emphasis added).

[0197] The genetically engineered bacteria of the invention may be destroyed, e.g., by defense factors in tissues or blood serum (Sonnenborn et al., 2009). In some embodiments, the genetically engineered bacteria are administered repeatedly. In some embodiments, the genetically engineered bacteria are administered once.

[0198] In certain embodiments, the effectors and/or immune modulator(s) described herein are expressed in one species, strain, or subtype of genetically engineered bacteria. In alternate embodiments, the effector and/or immune modulator is expressed in two or more species, strains, and/or subtypes of genetically engineered bacteria. One of ordinary skill in the art would appreciate that the genetic modifications disclosed herein may be modified and adapted for other species, strains, and subtypes of bacteria.

[0199] Further examples of bacteria which are suitable are described in International Patent Publication WO/2014/043593, the contents of which is herein incorporated by reference in its entirety. In some embodiments, such bacteria are mutated to attenuate one or more virulence factors.

[0200] In some embodiments, the genetically engineered bacteria of the disclosure proliferate and colonize a host. In some embodiments, colonization persists for several days, several weeks, several months, several years or indefinitely. In some embodiments, the genetically engineered bacteria do not proliferate in the host and bacterial counts drop off quickly post administration, e.g., less than a week post administration, until no longer detectable.

### Bacteriophages

[0201] In some embodiments, the genetically engineered bacteria of the disclosure comprise one or more lysogenic, dormant, temperate, intact, defective, cryptic, or satellite phage or bacteriocins/phage tail or gene transfer agents in their natural state. In some embodiments, the prophage or bacteriophage exists in all isolates of a particular bacterium of interest. In some embodiments, the bacteria are genetically engineered derivatives of a parental strain comprising one or more of such bacteriophage. In any of the embodiments described herein, the bacteria may comprise one or more modifications or mutations within a prophage or bacteriophage genome which alters the properties or behavior of the bacteriophage. In some embodiments, the modifications or mutations prevent the prophage from entering or completing the lytic process. In some embodiments, the modifications or mutations prevent the phage from infecting other bacteria of the same or a different type. In some embodiments, the modifications or mutations alter the fitness of the bacterial host. In some embodiments, the modifications or mutations no not alter the fitness of the bacterial host. In some embodiments, the modifications or mutations have an impact on the desired effector function, e.g., on levels of expression of the effector molecule, e.g., immune modulator, e.g., immune stimulator or sustainer, of the genetically engineered bacterium. In some embodiments, the modifications or mutations have no impact on the desired function e.g., on levels of expression of the effector molecule or on levels of activity of the effector molecule.

[0202] Phage genome size varies, ranging from the smallest Leuconostoc phage L5 (2,435 bp), ˜11.5 kbp (e.g. Mycoplasma phage P1), ˜21 kbp (e.g. Lactococcus phage c2), and ˜30 kbp (e.g. Pasteurella phage F108) to the almost 500 kbp genome of Bacillus megaterium phage G (Hatfull and Hendrix; Bacteriophages and their Genomes, Cuff Opin Virol. 2011 Oct. 1; 1(4): 298-303, and references therein). Phage genomes may encode less than 10 genes up to several hundreds of genes. Temperate phages or prophages are typically integrated into the chromosome(s) of the bacterial host, although some examples of phages that are integrated into bacterial plasmids also exist (Little, Loysogeny, Prophage Induction, and Lysogenic Conversion. In: Waldor M K, Friedman D I, Adhya S, editors. Phages Their Role in Bacterial Pathogenesis and Biotechnology. Washington D.C.: ASM Press; 2005. pp. 37-54). In some cases, the phages are always located at the same position within the bacterial host chromosome(s), and this position is specific to each phage, i.e., different phages are located at different positions. Other phages can integrate at numerous different locations.

[0203] Accordingly, the bacteria of the disclosure comprise one or more phages genomes which may vary in length, from at least about 1 bp to 10 kb, from at least about 10 kb to 20 kb, from at least about 20 kb to 30 kb, from at least about 30 kb to 40 kb, from at least about 30 kb to 40 kb, from at least about 40 kb to 50 kb, from at least about 50 kb to 60 kb, from at least about 60 kb to 70 kb, from at least about 70 kb to 80 kb, from at least about 80 kb to 90 kb, from at least about 90 kb to 100 kb, from at least about 100 kb to 120 kb, from at least about 120 kb to 140 kb, from at least about 140 kb to 160 kb, from at least about 160 kb to 180 kb, from at least about 180 kb to 200 kb, from at least about 200 kb to 180 kb, from at least about 160 kb to 250 kb, from at least about 250 kb to 300 kb, from at least about 300 kb to 350 kb, from at least about 350 kb to 400 kb, from at least about 400 kb to 500 kb, from at least about 500 kb to 1000 kb. In one embodiment, the genetically engineered bacteria comprise a bacteriophage genome greater than 1000 kb in length.

[0204] In some embodiments, the bacteria of the disclosure comprise one or more phages genomes, which comprise one or more genes encoding one or more polypeptides. In one embodiment, the genetically engineered bacteria comprise a bacteriophage genome comprising at least about 1 to 5 genes, at least about 5 to 10 genes, at least about 10 to 15 genes, at least about 15 to 20 genes, at least about 20 to 25 genes, at least about 25 to 30 genes, at least about 30 to 35 genes, at least about 35 to 40 genes, at least about 40 to 45 genes, at least about 45 to 50 genes, at least about 50 to 55 genes, at least about 55 to 60 genes, at least about 60 to 65 genes, at least about 65 to 70 genes, at least about 70 to 75 genes, at least about 75 to 80 genes, at least about 80 to 85 genes, at least about 85 to 90 genes, at least about 90 to 95 genes, at least about 95 to 100 genes, at least about 100 to 115 genes, at least about 115 to 120 genes, at least about 120 to 125 genes, at least about 125 to 130 genes, at least about 130 to 135 genes, at least about 135 to 140 genes, at least about 140 to 145 genes, at least about 145 to 150 genes, at least about 150 to 160 genes, at least about 160 to 170 genes, at least about 170 to 180 genes, at least about 180 to 190 genes, at least about 190 to 200 genes, at least about 200 to 300 genes. In one embodiment, the genetically engineered bacteria comprise a bacteriophage genome comprising more than about 300 genes.

[0205] In some embodiments, the phage is always or almost always located at the same location or position within the bacterial host chromosome(s) in a particular species. In some embodiments, the phages are found integrated at different locations within the host chromosome in a particular species. In some embodiments, the phage is located on a plasmid.

[0206] In some embodiments, the prophage may be a defective or a cryptic prophage. Defective prophages can no longer undergo a lytic cycle. Cryptic prophages may not be able to undergo a lytic cycle or never have undergone a lytic cycle (Bobay et al., 2014). In some embodiments, the bacteria comprise one or more satellite phage genomes. Satellite phages are otherwise functional phages that do not carry their own structural protein genes, and have genomes that are configures for encapsulation by the structural proteins of other specific phages (Six and Klug Bacteriophage P4: a satellite virus depending on a helper such as prophage P2, Virology, Volume 51, Issue 2, February 1973, Pages 327-344).

[0207] In some embodiments, the bacteria comprise one or more tailiocins. Many bacteria, both gram positive and gram negative, produce a variety of particles resembling phage tails that are functional without an associated phage head (termed tailiocins), and many of which have been shown to have bacteriocin properties (reviewed in Ghequire and Mot, The Tailocin Tale: Peeling off Phage; Trends in Microbiology, October 2015, Vol. 23, No. 10). Phage tail-like bacteriocins are classified two different families: contractile phage tail-like (R-type) and noncontractile but flexible ones (F-type). In some embodiments, the bacteria comprise one or more gene transfer agents. Gene transfer agents (GTAs) are phage-like elements that are encoded by some bacterial genomes. Although GTAs resemble phages, they lack the hallmark capabilities that define typical phages, and they package random fragments of the host cell DNA and then transfer them horizontally to other bacteria of the same species (reviewed in Lang et al., Gene transfer agents: phage-like elements of genetic exchange, Nat Rev Microbiol. 2012 Jun. 11; 10(7): 472-482). There, the DNA can replace the resident cognate chromosomal region by homologous recombination. However, these particles cannot propagate as viruses, as the vast majority of the particles do not carry the genes that encode the GTA. In some embodiments, the bacteria comprise one or more filamentous virions. Filamentous virions integrate as dsDNA prophages (reviewed in Marvin D A, et al, Structure and assembly of filamentous bacteriophages, Prog Biophys Mol Biol. 2014 April; 114(2):80-122). In any of these embodiments, the bacteria described herein comprising defective or a cryptic prophage, satellite phage genomes, tailiocins, gene transfer agents, filamentous virions, which may comprise one or more modifications or mutations within their sequence.

[0208] Prophages can be either identified experimentally or computationally. The experimental approach involves inducing the host bacteria to release phage particles by exposing them to UV light or other DNA-damaging conditions. However, in some cases, the conditions under which a prophage is induced is unknown, and therefore the absence of plaques in a plaque assay does not necessarily prove the absence of a prophage. Additionally, this approach can show only the existence of viable phages, but will not reveal defective prophages. As such, computational identification of prophages from genomic sequence data has become the most preferred route.

[0209] Co-pending International Patent Application PCT/US18/38840, filed Jun. 21, 2018, herein incorporated by reference in their entireties, provide non-limiting examples of probiotic bacteria which contain number of potential bacteriophages contained in the bacterial genome as determined by Phaster scoring. Phaster scoring is described in detail at phaster.ca and in Zhou, et al. (“PHAST: A Fast Phage Search Tool” Nucl. Acids Res. (2011) 39 (suppl 2): W347-W352) and Arndt et al. (Arndt, et al. (2016) PHASTER: a better, faster version of the PHAST phage search tool. Nucleic Acids Res., 2016 May 3). In brief, three methods are applied with different criteria to score for prophage regions (as intact, questionable, or incomplete) within a provided bacterial genome sequence.

[0210] In any of the embodiments described herein, the bacteria described herein may comprise one or more modifications or mutations within an existing prophage or bacteriophage genome. In some embodiments, these modifications alter the properties or behavior of the prophage. In some embodiments, the modifications or mutations prevent the prophage from entering or completing the lytic process. In some embodiments, the modifications or mutations prevent the phage from infecting other bacteria of the same or a different type. In some embodiments, the modifications or mutations alter the fitness of the bacterial host. In some embodiments, the modifications or mutations do not alter the fitness of the bacterial host. In some embodiments, the modifications or mutations have an impact on the desired effector function, e.g., of a genetically engineered bacterium. In some embodiments, the modifications or mutations do not have an impact on the desired effector function, e.g., of a genetically engineered bacterium.

[0211] In some embodiments, the modifications or mutations reduce entry or completion of prophage lytic process at least about 1- to 2-fold, at least about 2- to 3-fold, at least about 3- to 4-fold, at least about 4- to 5-fold, at least about 5- to 10-fold, at least about 10 to 100-fold, at least about 100- to 1000-fold. In some embodiments, the modifications or mutations completely prevent entry or completion of prophage lytic process.

[0212] In some embodiments, the modifications or mutations reduce entry or completion of prophage lytic process by at least about 1% to 10%, at least about 10% to 20%, at least about 20% to 30%, at least about 30% to 40%, at least about 40% to 50%, at least about 50% to 60%, at least about 60% to 70%, at least about 70% to 80%, at least about 80% to 90%, or at least about 90% to 100%.

[0213] In some embodiments, the mutations include one or more deletions within the phage genome sequence. In some embodiments, the mutations include one or more insertions into the phage genome sequence. In some embodiments, an antibiotic cassette can be inserted into one or more positions within the phage genome sequence. In some embodiments, the mutations include one or more substitutions within the phage genome sequence. In some embodiments, the mutations include one or more inversions within the phage genome sequence. In some embodiments, the modifications within the phage genome are combinations of two or more of insertions, deletions, substitutions, or inversions within one or more phage genome genes. In any of the embodiments described herein, the modifications may result in one or more frameshift mutations in one or more genes within the phage genome.

[0214] An any of these embodiments, the mutations can be located within or encompass one or more genes encoding proteins of various functions, e.g., lysis, e.g., proteases or lysins, toxins, antibiotic resistance, translation, structural (e.g., head, tail, collar, or coat proteins), bacteriophage assembly, recombination (e.g., integrases, invertases, or transposases), or replication (e.g., primases, tRNA related proteins), phage insertion, attachment, packaging, or terminases.

[0215] In some embodiments, described herein genetically engineered bacteria are engineered Escherichia coli strain Nissle 1917 (E. coli Nissle). As described in co-pending International Patent Application PCT/US18/38840, filed Jun. 21, 2018, herein incorporated by reference in their entireties, in more detail herein in the examples, routine testing procedures identified bacteriophage production from Escherichia coli Nissle 1917 (E. coli Nissle) and related engineered derivatives. To determine the source of the bacteriophage, a collaborative bioinformatics assessment of the genomes of E. coli Nissle, and engineered derivatives was conducted to analyze genomic sequences of the strains for evidence of prophages, to assess any identified prophage elements for the likelihood of producing functional phage, to compare any functional phage elements with other known phage identified among bacterial genomic sequences, and to evaluate the frequency with which prophage elements are found in other sequenced Escherichia coli (E. coli) genomes. The assessment tools included phage prediction software (PHAST and PHASTER), SPAdes genome assembler software, software for mapping low-divergent sequences against a large reference genome (BWA MEM), genome sequence alignment software (MUMmer), and the National Center for Biotechnology Information (NCBI) nonredundant database. The assessment results showed that E. coli Nissle and engineered derivatives analyzed contain three candidate prophage elements, with two of the three (Phage 2 and Phage 3) containing most genetic features characteristic of intact phage genomes. Two other possible phage elements were also identified. Of note, the engineered strains did not contain any additional phage elements that were not identified in parental E. coli Nissle, indicating that plaque-forming units produced by these strains originate from one of these endogenous phages (Phage 3). Interestingly, Phage 3 is unique to E. coli Nissle among a collection of almost 6000 sequenced E. coli genomes, although related sequences limited to short regions of homology with other putative prophage elements are found in a small number of genomes. Phage 3, but not any of the other Phage, was found to be inducible and result in bacterial lysis upon induction.

[0216] Prophages are very common among E. coli strains, with E. coli Nissle containing a relatively small number of prophage sequences compared to the average number found in a well-characterized set of sequenced E. coli genomes. As such, prophage presence in the engineered strains is part of the natural state of this species and the prophage features of the engineered strains analyzed were consistent with the progenitor strain, E. coli Nissle.

[0217] In some embodiments, the bacteria described herein may comprise one or more modifications or mutations within the E. coli Nissle Phage 3 genome which alters the properties or behavior of Phage 3. In some embodiments, the modifications or mutations prevent Phage 3 from entering or completing the lytic process. In some embodiments, the modifications or mutations prevent the E. coli Nissle Phage 3 from infecting other bacteria of the same or a different type. In some embodiments, the modifications or mutations improve the fitness of the bacterial host. In some embodiments, the no effect fitness of the bacterial host is observed. In some embodiments, the modifications or mutations have an impact on the desired effector function, e.g., expression of the immune modulator. In some embodiments, no impact on the desired effector function, e.g., expression of the immune modulator, is observed.

[0218] In some embodiments, the mutations introduced into the bacterial chassis include one or more deletions within the E. coli Nissle Phage 3 genome sequence. In some embodiments, the mutations include one or more insertions into the E. coli Nissle Phage 3 genome sequence. In some embodiments, an antibiotic cassette can be inserted into one or more positions within the E. coli Nissle Phage 3 genome sequence. Mutations with Phage 3 are described in more details in Co-pending U.S. provisional applications 62/523,202 and 62/552,829, herein incorporated by reference in their entireties.

[0219] In one specific embodiment, at least about 9000 to 10000 bp of the E. coli Nissle Phage 3 genome are mutated, e.g., in one example, 9687 bp of the E. coli Nissle Phage 3 genome are deleted.

[0220] In any of the embodiments described herein, the modifications encompass are located in one or more genes selected from ECOLIN_09965, ECOLIN_09970, ECOLIN_09975, ECOLIN_09980, ECOLIN_09985, ECOLIN_09990, ECOLIN_09995, ECOLIN_10000, ECOLIN_10005, ECOLIN_10010, ECOLIN_10015, ECOLIN_10020, ECOLIN_10025, ECOLIN_10030, ECOLIN_10035, ECOLIN_10040, ECOLIN_10045, ECOLIN_10050, ECOLIN_10055, ECOLIN_10065, ECOLIN_10070, ECOLIN_10075, ECOLIN_10080, ECOLIN_10085, ECOLIN_10090, ECOLIN_10095, ECOLIN_10100, ECOLIN_10105, ECOLIN_10110, ECOLIN_10115, ECOLIN_10120, ECOLIN_10125, ECOLIN_10130, ECOLIN_10135, ECOLIN_10140, ECOLIN_10145, ECOLIN_10150, ECOLIN_10160, ECOLIN_10165, ECOLIN_10170, ECOLIN_10175, ECOLIN_10180, ECOLIN_10185, ECOLIN_10190, ECOLIN_10195, ECOLIN_10200, ECOLIN_10205, ECOLIN_10210, ECOLIN_10220, ECOLIN_10225, ECOLIN_10230, ECOLIN_10235, ECOLIN_10240, ECOLIN_10245, ECOLIN_10250, ECOLIN_10255, ECOLIN_10260, ECOLIN_10265, ECOLIN_10270, ECOLIN_10275, ECOLIN_10280, ECOLIN_10290, ECOLIN 10295, ECOLIN_10300, ECOLIN_10305, ECOLIN_10310, ECOLIN_10315, ECOLIN 10320, ECOLIN_10325, ECOLIN_10330, ECOLIN 10335, ECOLIN_10340, and ECOLIN_10345.

[0221] In one embodiment, the mutation is a complete or partial deletion of one or more of ECOLIN_10110, ECOLIN_10115, ECOLIN_10120, ECOLIN_10125, ECOLIN_10130, ECOLIN_10135, ECOLIN_10140, ECOLIN_10145, ECOLIN_10150, ECOLIN_10160, ECOLIN_10165, ECOLIN_10170, and ECOLIN_10175. In one specific embodiment, the mutation is a complete or partial deletion of ECOLIN_10110, ECOLIN_10115, ECOLIN_10120, ECOLIN_10125, ECOLIN_10130, ECOLIN_10135, ECOLIN_10140, ECOLIN_10145, ECOLIN_10150, ECOLIN_10160, ECOLIN_10165, and ECOLIN 10170, and ECOLIN_10175. In one specific embodiment, the mutation is a complete deletion of ECOLIN_10110, ECOLIN_10115, ECOLIN_10120, ECOLIN_10125, ECOLIN_10130, ECOLIN_10135, ECOLIN_10140, ECOLIN_10145, ECOLIN_10150, ECOLIN_10160, ECOLIN_10165, and ECOLIN_10170, and a deletion mutation of ECOLIN_10175.

### Effector Molecules

### Oncolysis and Activation of an Innate Immune Response

[0222] In certain embodiments, the effector molecule(s), or immune modulators(s) of the disclosure generates an innate immune response. In certain embodiments, the immune modulators(s) of the disclosure generates a local immune response. In some aspects, the effector molecule, or immune modulator, is able to activate systemic immunity against viral antigens. In certain embodiments, the immune modulators(s) generates a systemic or adaptive antiviral immune response. In some embodiments, the immune modulators(s) result in long-term immunological memory. Examples of suitable immune modulators(s), e.g., immune initiators and/or immune sustainers are described herein.

[0223] In some embodiments, one or more immune modulators may be produced by a modified microorganism described herein. In other embodiments, one or more immune modulators may be administered in combination with a modified microorganism capable of producing a second immune modulator(s). For example, one or more immune initiators may be administered in combination with a modified microorganism capable of producing one or more immune sustainers. In another embodiment, one or more immune sustainers may be administered in combination with a modified microorganism capable of producing one or more immune initiators. Alternatively, one or more first immune initiators may be administered in combination with a modified microorganism capable of producing one or more second immune initiators. Alternatively, one or more first immune sustainers may be administered in combination with a modified microorganism capable of producing one or more second immune sustainers.

### Antigens/Vaccines

[0224] By introducing viral antigens, e.g., a spike viral protein, to the local environment, an immune response can be raised against the particular virus or infected cell of interest known to be associated with that antigen. As used herein the term “viral antigen” is meant to refer to virus-specific antigens, and/or virus-associated antigens, e.g., a spike protein of SARS-CoV-2, e.g., the receptor binding domain (RBD) of a spike protein of SARS-CoV-2. The engineered microorganisms can be engineered such that the peptides, e.g. viral antigens, e.g., the receptor binding domain (RBD) of a spike protein of SARS-CoV-2, can be anchored in the microbial cell wall (e.g., at the microbial cell surface). Thus, in some embodiments, the genetically engineered bacteria, are engineered to produce one or more viral antigens. Non-limiting examples of such viral antigens which may be produced by the bacteria of the disclosure described e.g., in Liu W J., et al. 2017, Antiviral Research 137:82-92; Huang J., et al. 2007, Vaccine 25: 6981-6991; Chen H., et al., 2005, J Immunol 175: 591-598; Ahmed S. F., et al., 2020, Viruses 12: 254; and Grifoni A., et al., Cell Host & Microbe 27: 1-10; the contents of each of which is herein incorporated by reference in its entirety or otherwise known in the art.

[0225] In some embodiments, the genetically engineered bacteria express peptides e.g. viral antigens, e.g., the receptor binding domain (RBD) of a spike protein of SARS-CoV-2 in the microbial cell wall (e.g., at the microbial cell surface) which binds to a cell surface receptor on a cell (e.g., a mammalian cell, e.g., a human cell). In some embodiments, the cell surface receptor is angiotensin converting enzyme 2 (ACE2) receptor.

[0226] In some embodiments, the genetically engineered bacteria displays the peptides, e.g. viral antigens, e.g., the receptor binding domain (RBD) of a spike protein of SARS-CoV-2, at least 20%, at least 30%, at least 40%, at least 50%, at least 60%, at least 70%, at least 80% of the genetically engineered bacteria in a population. In some embodiments, the genetically engineered bacteria displays the peptides, e.g. viral antigens, e.g., the receptor binding domain (RBD) of a spike protein of SARS-CoV-2, between about 10% to about 20%, between about 20% to about 30%, between about 30% to about 40%, between about 40% to about 50%, between about 50% to about 60%, between about 60% to about 70%, between about 70% to about 80%, and between about 75% and about 80% of the genetically engineered bacteria in a population. In some embodiments, the genetically engineered bacteria displays peptides, e.g. viral antigens, e.g., the receptor binding domain (RBD) of a spike protein of SARS-CoV-2, where the peptide is anchored in the microbial cell wall. In some embodiments, the genetically engineered bacteria displays RBD. In some embodiments, the expressed and displayed RBD anchored in the cell wall binds to a cell surface receptor (e.g., angiotensin converting enzyme 2 (ACE2) receptor) on a cell. In some embodiments, the genetically engineered bacteria displays RBD, and the displayed RBD bind to the ACE2 receptor at least 20%, at least 30%, at least 40%, at least 50%, at least 60%, at least 70%, at least 80% of the genetically engineered bacteria displaying RBD in a population. In some embodiments, the genetically engineered bacteria displays RBD, and the displayed RBD bind to the ACE2 receptor between about 10% to about 20%, between about 20% to about 30%, between about 30% to about 40%, between about 40% to about 50%, between about 50% to about 60%, between about 60% to about 70%, between about 70% to about 80%, and between about 75% and about 80% of the genetically engineered bacteria displaying RBD in a population.

[0227] In any of these embodiments, the genetically engineered bacteria comprising gene sequence(s) encoding antigens further comprise gene sequence(s) encoding one or more further effector molecule(s), i.e., therapeutic molecule(s) or a metabolic converter(s). In any of these embodiments, the circuit encoding antigens may be combined with a circuit encoding one or more immune initiators or immune sustainers as described herein, in the same or a different bacterial strain (combination circuit or mixture of strains). The circuit encoding the immune initiators or immune sustainers may be under the control of a constitutive or inducible promoter, e.g., low oxygen inducible promoter or any other constitutive or inducible promoter described herein. In any of these embodiments, the gene sequence(s) encoding antigens may be combined with gene sequence(s) encoding one or more STING agonist producing enzymes, as described herein, in the same or a different bacterial strain (combination circuit or mixture of strains). In some embodiments, the gene sequences which are combined with the gene sequence(s) encoding antigens encode DacA. DacA may be under the control of a constitutive or inducible promoter, e.g., low oxygen inducible promoter such as FNR or any other constitutive or inducible promoter described herein. In some embodiments, the dacA gene is integrated into the chromosome. In some embodiments, the gene sequences which are combined with the gene sequence(s) encoding antigens encode cGAS. cGAS may be under the control of a constitutive or inducible promoter, e.g., low oxygen inducible promoter such as FNR or any other constitutive or inducible promoter described herein. In some embodiments, the gene encoding cGAS is integrated into the chromosome. In any of these combination embodiments, the bacteria may further comprise an auxotrophic modification, e.g., a mutation or deletion in DapA, ThyA, or both. In any of these embodiments, the bacteria may further comprise a phage modification, e.g., a mutation or deletion, in an endogenous prophage as described herein.

### STING Agonists

[0228] Stimulator of interferon genes (STING) protein was shown to be a critical mediator of the signaling triggered by cytosolic nucleic acid derived from DNA viruses, bacteria, and tumor-derived DNA. The ability of STING to induce type I interferon production lead to studies in the context of antitumor immune response, and as a result, STING has emerged to be a potentially potent target in many different immunotherapies. A large part of the effects caused by STING activation may depend upon production of IFN-β by APCs and improved antigen presentation by these cells, which promotes CD8+ T cell priming against viral antigens. However, STING protein is also expressed broadly in a variety of cell types including myeloid-derived suppressor cells (MDSCs) and cancer cells, in which the function of the pathway has not yet been well characterized (Sokolowska, O. & Nowis, D; STING Signaling in Cancer Cells: Important or Not?; Archivum Immunologiae et Therapiae Experimentalis; Arch. Immunol. Ther. Exp. (2018) 66: 125).

[0229] Stimulator of interferon genes (STING), also known as transmembrane protein 173 (TMEM173), mediator of interferon regulatory factor 3 activation (MITA), MPYS or endoplasmic reticulum interferon stimulator (ERIS), is a dimeric protein which is mainly expressed in macrophages, T cells, dendritic cells, endothelial cells, and certain fibroblasts and epithelial cells. STING plays an important role in the innate immune response—mice lacking STING are viable though prone to lethal infection following exposure to a variety of microbes. STING functions as a cytosolic receptor for the second messengers in the form of cytosolic cyclic dinucleotides (CDNs), such as cGAMP and the bacterial second messengers c-di-GMP and c-di-AMP. Upon stimulation by the CDN a conformational change in STING occurs. STING translocates from the ER to the Golgi apparatus and its carboxyterminus is liberated, This leads to the activation of TBK1 (TANK-binding kinase 1)/IRF3 (interferon regulatory factor 3), NF-κB, and STAT6 signal transduction pathways, and thereby promoting type I interferon and proinflammatory cytokine responses. CDNs include canonical cyclic di-GMP (c[G(30-50)pG(30-50)p] or cyclic di-AMP or cyclic GAMP (cGMP-AMP) (Barber, STING-dependent cytosolic DNA sensing pathways; Trends Immunol. 2014 February; 35(2):88-93).

[0230] CDNs can be exogenously (i.e., bacterially) and/or endogenously produced (i.e., within the host by a host enzyme upon exposure to dsDNA). STING is able to recognize various bacterial second messenger molecules cyclic diguanylate monophosphate (c-di-GMP) and cyclic diadenylate monophosphate (c-di-AMP), which triggers innate immune signaling response (Ma et al., The cGAS-STING Defense Pathway and Its Counteraction by Viruses; Cell Host & Microbe 19, Feb. 10, 2016). Additionally cyclic GMPAMP (cGAMP) can also bind to STING and result inactivation of IRF3 and (3-interferon production. Both 3′5′-3′5′ cGAMP (3′3′ cGAMP) produced by Vibrio cholerae, and the metazoan secondary messenger cyclic [G(2′,5′)pA(3′5′)] (2′3′ cGAMP), could activate the innate immune response through STING pathway (Yi et al., Single Nucleotide Polymorphisms of Human STING Can Affect Innate Immune Response to Cyclic Dinucleotides; PLOS One (2013). 8(10)e77846, an references therein). Bacterial and metazoan (e.g., human) c-di-GAMP synthases (cGAS) utilizes GTP and ATP to generate cGAMP capable of STING activation. In contrast to prokaryotic CDNs, which have two canonical 30-50 phosphodiester linkages, the human cGAS product contains a unique 20-50 bond resulting in a mixed linkage cyclic GMP-AMP molecule, denoted as 2′,3′ cGAMP (as described in (Kranzusch et al., Ancient Origin of cGAS-STING Reveals Mechanism of Universal 2′,3′ cGAMP Signaling; Molecular Cell 59, 891-903, Sep. 17, 2015 and references therein). The bacterium Vibrio cholerae encodes an enzyme called DncV that is a structural homolog of cGAS and synthesizes a related second messenger with canonical 3′-5′ bonds (3′,3′ cGAMP).

[0231] Components of the stimulator of interferon genes (STING) pathway plays an important role in the detection of tumor cells by the immune system. In preclinical studies, cyclic dinucleotides (CDN), naturally occurring or rationally designed synthetic derivatives, are able to promote an aggressive antitumor response. For example, when co-formulated with an irradiated GM-CSF-secreting whole-cell vaccine in the form of STINGVAX, synthetic CDNs increased the antitumor efficacy and STINGVAX combined with PD-1 blockade induced regression of established tumors (Fu et al., STING agonist formulated cancer vaccines can cure established tumors resistant to PD-1 blockade; Sci Transl Med. 2015 Apr. 15; 7(283): 283ra52). In another example, Smith et al. conducted a study showing that STING agonists may augment CAR T therapy by stimulating the immune response to eliminate tumor cells that are not recognized by the adoptively transferred lymphocytes and thereby improve the effectiveness of CAR T cell therapy (Smith et al., Biopolymers co-delivering engineered T cells and STING agonists can eliminate heterogeneous tumors; J Clin Invest. 2017 Jun. 1; 127(6):2176-2191).

[0232] In some embodiments, the genetically engineered bacterium is capable of producing one or more STING agonists. Non limiting examples of STING agonists which can be produced by the genetically engineered bacteria of the disclosure include 3′3′ cGAMP, 2′3′cGAMP, 2′2′-cGAMP, 2′2′-cGAMP VacciGrade™ (Cyclic [G(2′,5′)pA(2′,5′)p]), 2′3′-cGAMP, 2′3′-cGAMP VacciGrade™ (Cyclic [G(2′,5′)pA(3′,5′)p]), 2′3′-cGAM(PS)2 (Rp/Sp), 3′3′-cGAMP, 3′3′-cGAMP VacciGrade™ (Cyclic [G(3′,5′)pA(3′,5′)p]), c-di-AMP, c-di-AMP VacciGrade™ (Cyclic diadenylate monophosphate Th1/Th2 response), 2′3′-c-di-AMP, 2′3′-c-di-AM(PS)2 (Rp,Rp) (Bisphosphorothioate analog of c-di-AMP, Rp isomers), 2′3′-c-di-AM(PS)2 (Rp,Rp) VacciGrade™, c-di-GMP, c-di-GMP VacciGrade™, 2′3′-c-di-GMP, and c-di-IMP. In some embodiments, the genetically engineered bacterium is that comprises a gene encoding one or more enzymes for the production of one or more STING agonists. Cyclic-di-GAMP synthase (cdi-GAMP synthase or cGAS) produces the cyclic-di-GAMP from one ATP and one GTP. In some embodiments, the enzymes are c-di-GAMP synthases (cGAS). In one embodiment, the genetically engineered bacteria comprise one or more gene sequences for the expression of an enzyme in class EC 2.7.7.86. In some embodiments, such enzymes are bacterial enzymes. In some embodiments, the enzyme is a bacterial c-di-GMP synthase. In some embodiments, the enzyme is a bacterial c-GAMP synthase (GMP-AMP synthase). In some embodiments, the bacteria are capable of producing 3′3′ c-dGAMP.

[0233] In some embodiments, the bacteria are capable of producing 3′3′-cGAM P. According to the instant disclosure several enzymes suitable for production of 3′3′-cGAMP from genetically engineered bacteria were identified. These enzymes include the Vibrio cholerae cGAS orthologs from Verminephrobacter eiseniae (EF01-2 Earthworm symbiont), Kingella denitrificans (ATCC 33394), and Neisseria bacilliformis (ATCC BAA-1200). Accordingly, in some embodiments, the genetically engineered bacteria comprise gene sequences encoding cGAS from Vibrio cholerae. Accordingly, in some embodiments, the genetically engineered bacteria comprise gene sequences encoding one or more Vibrio cholerae cGAS orthologs from species selected from Verminephrobacter eiseniae (EF01-2 Earthworm symbiont), Kingella denitrificans (ATCC 33394), and Neisseria bacilliformis (ATCC BAA-1200). In some embodiments, the bacteria comprise a gene sequence encoding DncV. In some embodiments, DncV is from Vibrio cholerae. In one embodiment, the DncV orthologue is from Verminephrobacter eiseniae. In one embodiment, the DncV orthologue is from Kingella denitrificans. In one embodiment, the DncV orthologue is from Neisseria bacilliformis. In some embodiments, the genetically engineered bacteria comprise a gene sequence encoding a DncV ortholog from a species selected from Enhydrobacter aerosaccus, Kingella denitrificans, Neisseria bacilliformis, Phaeobacter gallaeciensi, Citromicrobium sp., Roseobacter litoralis, Roseovarius sp., Methylobacterium populi, Erythrobacter sp., Erythrobacter litoralis, Methylophaga thiooxydans, Methylophaga thiooxydans, Herminiimonas arsenicoxydans, Verminephrobacter eiseniae, Methylobacter tundripaludum, Psychrobacter arcticus, Vibrio cholerae, Vibrio sp, Aeromonas salmonicida, Serratia odorifera, Verminephrobacter eiseniae, and Methylovorus glucosetrophus.

[0234] In some embodiments, the genetically engineered bacteria are capable of producing 2′3′-cGAMP. Human cGAS is known to produce 2′3′-cGAMP. In some embodiments, the genetically engineered bacteria comprise gene sequences encoding human cGAS.

[0235] In some embodiments, the genetically engineered bacteria are capable of increasing c-GAMP (2′3′ or 3′3′) levels in the microenvironment. In some embodiments, the genetically engineered bacteria are capable of increasing c-GAMP levels in the intracellular space In some embodiments, the genetically engineered bacteria are capable of increasing c-GAMP levels inside of a eukaryotic cell. In some embodiments, the genetically engineered bacteria are capable of increasing c-GAMP (2′3′ or 3′3′) levels inside of an immune cell. In some embodiments, the cell is a phagocyte. In some embodiments, the cell is a macrophage. In some embodiments, the cell is a dendritic cell. In some embodiments, the cell is a neutrophil. In some embodiments, the cell is a MDSC. In some embodiments, the genetically engineered bacteria are capable of increasing c-GAMP (2′3′ or 3′3′) inside of a cell. In some embodiments, the genetically engineered bacteria are capable of increasing c-GAMP levels in vitro in the bacterial cell and/or in the growth medium.

[0236] In one embodiment, the genetically engineered bacteria comprise gene sequence(s) encoding bacterial c-di-GAMP synthase from Vibrio cholerae. In some embodiments, the enzyme is DncV.

[0237] In one embodiment, the genetically engineered bacteria comprise gene sequence(s) encoding c-di-AMP synthase from Verminephrobacter eiseniae. In one embodiment, the bacterial c-di-GAMP synthase is DcnV ortholog from Verminephrobacter eiseniae (EF01-2 Earthworm symbiont). In some embodiments, the genetically engineered bacteria comprise c-di-GAMP synthase gene sequence(s) encoding one or more polypeptide(s) comprising SEQ ID NO: 1262 or functional fragments thereof. In some embodiments, genetically engineered bacteria comprise a gene sequence encoding a polypeptide that has at least about 80%, at least about 85%, at least about 90%, at least about 95%, or at least about 99% identity to SEQ ID NO: 1262 or a functional fragment thereof. In some embodiments, the polypeptide has at least about 85%, 86%, 87%, 88%, 89%, 90%, 91%, 92%, 93%, 94%, 95%, 96%, 97%, 98%, or 99% identity with SEQ ID NO: 1262. In some specific embodiments, the polypeptide comprises SEQ ID NO: 1262. In other specific embodiments, the polypeptide consists of SEQ ID NO: 1262. In certain embodiments, the bacterial c-di-GAMP synthase gene sequence has at least about 80% identity with SEQ ID NO: 1265. In certain embodiments, the gene sequence has at least about 90% identity with SEQ ID NO: 1265. In certain embodiments, the gene sequence has at least about 95% identity with SEQ ID NO: 1265. In some embodiments, the gene sequence has at least about 85%, 86%, 87%, 88%, 89%, 90%, 91%, 92%, 93%, 94%, 95%, 96%, 97%, 98%, or 99% identity with SEQ ID NO: 1265. In some specific embodiments, the gene sequence comprises SEQ ID NO: 1265. In other specific embodiments, the gene sequence consists of SEQ ID NO: 1265.

[0238] In one embodiment, the genetically engineered bacteria comprise gene sequence(s) encoding c-di-AMP synthase from Kingella denitrificans (ATCC 33394). In one embodiment, the bacterial c-di-GAMP synthase is DcnV ortholog from Kingella denitrificans. In some embodiments, the genetically engineered bacteria comprise c-di-GAMP synthase gene sequence(s) encoding one or more polypeptide(s) comprising SEQ ID NO: 1260 or functional fragments thereof. In some embodiments, genetically engineered bacteria comprise a gene sequence encoding a polypeptide that has at least about 80%, at least about 85%, at least about 90%, at least about 95%, or at least about 99% identity to SEQ ID NO: 1260 or a functional fragment thereof. In some embodiments, the polypeptide has at least about 85%, 86%, 87%, 88%, 89%, 90%, 91%, 92%, 93%, 94%, 95%, 96%, 97%, 98%, or 99% identity with SEQ ID NO: 1260. In some specific embodiments, the polypeptide comprises SEQ ID NO: 1260. In other specific embodiments, the polypeptide consists of SEQ ID NO: 1260. In certain embodiments, the bacterial c-di-GAMP synthase gene sequence has at least about 80% identity with SEQ ID NO: 1263. In certain embodiments, the gene sequence has at least about 90% identity with SEQ ID NO: 1263. In certain embodiments, the gene sequence has at least about 95% identity with SEQ ID NO: 1263. In some embodiments, the gene sequence has at least about 85%, 86%, 87%, 88%, 89%, 90%, 91%, 92%, 93%, 94%, 95%, 96%, 97%, 98%, or 99% identity with SEQ ID NO: 1263. In some specific embodiments, the gene sequence comprises SEQ ID NO: 1263. In other specific embodiments, the gene sequence consists of SEQ ID NO: 1263.

[0239] In one embodiment, the genetically engineered bacteria comprise gene sequence(s) encoding c-di-AMP synthase from Neisseria bacilliformis (ATCC BAA-1200). In one embodiment, the bacterial c-di-GAMP synthase is DenV ortholog from Neisseria bacilliformis. In some embodiments, the genetically engineered bacteria comprise c-di-GAMP synthase gene sequence(s) encoding one or more polypeptide(s) comprising SEQ ID NO: 1261 or functional fragments thereof. In some embodiments, genetically engineered bacteria comprise a gene sequence encoding a polypeptide that is at least about 80%, at least about 85%, at least about 90%, at least about 95%, or at least about 99% identity to SEQ ID NO: 1261 or a functional fragment thereof. In some embodiments, the polypeptide has at least about 85%, 86%, 87%, 88%, 89%, 90%, 91%, 92%, 93%, 94%, 95%, 96%, 97%, 98%, or 99% identity with SEQ ID NO: 1261. In some specific embodiments, the polypeptide comprises SEQ ID NO: 1261. In other specific embodiments, the polypeptide consists of SEQ ID NO: 1261. In certain embodiments, the c-di-GAMP synthase sequence has at least about 80% identity with SEQ ID NO: 1264. In certain embodiments, the gene sequence has at least about 90% identity with SEQ ID NO: 1264. In certain embodiments, the gene sequence has at least about 95% identity with SEQ ID NO: 1264. In some embodiments, the gene sequence has at least about 85%, 86%, 87%, 88%, 89%, 90%, 91%, 92%, 93%, 94%, 95%, 96%, 97%, 98%, or 99% identity with SEQ ID NO: 1264. In some specific embodiments, the gene sequence comprises SEQ ID NO: 1264. In other specific embodiments, the gene sequence consists of SEQ ID NO: 1264.

[0240] In one embodiment, the genetically engineered bacteria comprise gene sequence(s) encoding mammalian c-di-GAMP enzymes. In some embodiments, the STING agonist producing enzymes are human enzymes. In some embodiments, the gene sequence(s) are codon-optimized for expression in a microorganism host cell. In one embodiment, the genetically engineered bacteria comprise gene sequence(s) encoding the human polypeptide cGAS. In some embodiments, the genetically engineered bacteria comprise human cGAS gene sequence(s) encoding one or more polypeptide(s) comprising SEQ ID NO: 1254 or functional fragments thereof. In some embodiments, genetically engineered bacteria comprise a gene sequence encoding a polypeptide that is at least about 80%, at least about 85%, at least about 90%, at least about 95%, or at least about 99% identity to SEQ ID NO: 1254 or a functional fragment thereof. In some embodiments, the polypeptide has at least about 85%, 86%, 87%, 88%, 89%, 90%, 91%, 92%, 93%, 94%, 95%, 96%, 97%, 98%, or 99% identity with SEQ ID NO: 1254. In some specific embodiments, the polypeptide comprises SEQ ID NO: 1254. In other specific embodiments, the polypeptide consists of SEQ ID NO: 1254. In certain embodiments, the human cGAS sequence has at least about 80% identity with SEQ ID NO: 1255. In certain embodiments, the gene sequence has at least about 90% identity with SEQ ID NO: 1255. In certain embodiments, the gene sequence has at least about 95% identity with SEQ ID NO: 1255. In some embodiments, the gene sequence has at least about 85%, 86%, 87%, 88%, 89%, 90%, 91%, 92%, 93%, 94%, 95%, 96%, 97%, 98%, or 99% identity with SEQ ID NO: 1255. In some specific embodiments, the gene sequence comprises SEQ ID NO: 1264. In other specific embodiments, the gene sequence consists of SEQ ID NO: 1255.

[0241] In some embodiments, the bacteria are capable of producing cyclic-di-GMP. Accordingly, in some embodiments, the genetically engineered bacteria comprise gene sequence(s) encoding one or more diguanylate cyclase(s).

[0242] In some embodiments, the genetically engineered bacteria are capable of increasing cyclic-di-GMP levels in the microenvironment. In some embodiments, the genetically engineered bacteria are capable of increasing cyclic-di-GMP levels in the intracellular space In some embodiments, the genetically engineered bacteria are capable of increasing cyclic-di-GMP levels inside of a eukaryotic cell. In some embodiments, the genetically engineered bacteria are capable of increasing cyclic-di-GMP levels inside of an immune cell. In some embodiments, the cell is a phagocyte. In some embodiments, the cell is a macrophage. In some embodiments, the cell is a dendritic cell. In some embodiments, the cell is a neutrophil. In some embodiments, the cell is a MDSC. In some embodiments, the genetically engineered bacteria are capable of increasing c cyclic-di-GMP levels inside of a cell. In some embodiments, the genetically engineered bacteria are capable of increasing c-GMP levels in vitro in the bacterial cell and/or in the growth medium.

[0243] In some embodiments, the genetically engineered bacteria are capable of producing c-diAMP. Diadenylate cyclase produces one molecule cyclic-di-AMP from two ATP molecules. In one embodiment, the genetically engineered bacteria comprise one or more gene sequences for the expression of a diadenylate cyclase. In one embodiment, the genetically engineered bacteria comprise one or more gene sequences for the expression of an enzyme in class EC 2.7.7.85. In one embodiment, the diadenylate cyclase is a bacterial diadenylate cyclase. In one embodiment, the diadenylate cyclase is DacA. In one embodiment, the DacA is from Listeria monocytogenes.

[0244] In some embodiments, the genetically engineered bacteria comprise DacA gene sequence(s) encoding one or more polypeptide(s) comprising SEQ ID NO: 1257 or functional fragments thereof. In some embodiments, genetically engineered bacteria comprise a gene sequence encoding a polypeptide that has at least about 80%, at least about 85%, at least about 90%, at least about 95%, or at least about 99% identity to SEQ ID NO: 1257 or a functional fragment thereof. In some embodiments, the polypeptide has at least about 85%, 86%, 87%, 88%, 89%, 90%, 91%, 92%, 93%, 94%, 95%, 96%, 97%, 98%, or 99% identity with SEQ ID NO: 1257. In some specific embodiments, the polypeptide comprises SEQ ID NO: 1257. In other specific embodiments, the polypeptide consists of SEQ ID NO: 1257. In certain embodiments, the Dac A sequence has at least about 80% identity with SEQ ID NO: 1258. In certain embodiments, the gene sequence has at least about 90% identity with SEQ ID NO: 1258. In certain embodiments, the gene sequence has at least about 95% identity with SEQ ID NO: 1258. In some embodiments, the gene sequence has at least about 85%, 86%, 87%, 88%, 89%, 90%, 91%, 92%, 93%, 94%, 95%, 96%, 97%, 98%, or 99% identity with SEQ ID NO: 1258. In some specific embodiments, the gene sequence comprises SEQ ID NO: 1258. In other specific embodiments, the gene sequence consists of SEQ ID NO: 1258.

[0245] In some embodiments, the genetically engineered bacteria comprise DacA gene sequence(s) operably linked to a promoter which is inducible under low oxygen conditions, e.g., an FNR inducible promoter as described herein. In certain embodiments, the sequence of the DacA gene operably linked to the FNR inducible promoter has at least about 80% identity with SEQ ID NO: 1284. In certain embodiments, the sequence of the DacA gene operably linked to the FNR inducible promoter has at least about 90% identity with SEQ ID NO: 1258. In certain embodiments, the sequence of the DacA gene operably linked to the FNR inducible promoter has at least about 95% identity with SEQ ID NO: 1258. In some embodiments, the sequence of the DacA gene operably linked to the FNR inducible promoter has at least about 85%, 86%, 87%, 88%, 89%, 90%, 91%, 92%, 93%, 94%, 95%, 96%, 97%, 98%, or 99% identity with SEQ ID NO: 1258. In some specific embodiments, the sequence of the DacA gene operably linked to the FNR inducible promoter comprises SEQ ID NO: 1258. In other specific embodiments the sequence of the DacA gene operably linked to the FNR inducible promoter consists of SEQ ID NO: 1258.

[0246] Other suitable diadenylate cyclases are known in the art and include those include in the EggNog database (http://eggnogdb.embl.de). Non-limiting examples of diadenylate cyclases which can be expressed by the bacteria include Megasphaera sp. UPII 135-E (HMPREF1040_0026), Streptococcus anginosus SK52=DSM 20563 (HMPREF9966_0555), Streptococcus mitis bv. 2 str. SK95 (HMPREF9965_1675), Streptococcus infantis SK1076 (HMPREF9967_1568), Acetonema longum DSM 6540 (ALO_03356), Sporosarcina newyorkensis 2681 (HMPREF9372_2277), Listeria monocytogenes str. Scott A (BN418_2551), Candidatus arthromitus sp. SFB-mouse-Japan (SFBM_1354), Haloplasma contractile SSD-17B 2 seqs HLPCO_01750, HLPCO_08849), Lactobacillus kefiranofaciens ZW3 (WANG_0941), Mycoplasma anatis 1340 (GIG_03148), Streptococcus constellatus subsp. pharyngis SK1060=CCUG 46377 (HMPREF1042_1168), Streptococcus infantis SK970 (HMPREF9954_1628), Paenibacillus mucilaginosus KNP414 (YBBP), Nostoc sp. PCC 7120 (ALL2996), Mycoplasma columbinum SF7 (MCSF7_01321), Lactobacillus ruminis SPM0211 (LRU_01199), Candidatus arthromitus sp. SFB-rat-Yit (RATSFB_1182), Clostridium sp. SY8519 (CXIVA_02190), Brevibacillus laterosporus LMG 15441 (BRLA_C02240), Weissella koreensis KACC 15510 (WKK_01955), Brachyspira intermedia PWS/A (BINT_2204), Bizionia argentinensis JUB59 (BZARG_2617), Streptococcus salivarius 57.1 (SSAL_01348), Alicyclobacillus acidocaldarius subsp. acidocaldarius Tc-4-1 (TC41_3001), Sulfobacillus acidophilus TPY (TPY_0875), Streptococcus pseudopneumoniae IS7493 (SPPN_07660), Megasphaera elsdenii DSM 20460 (MELS_0883), Streptococcus infantarius subsp. infantarius CJ18 (SINF1263), Blattabacterium sp. (Mastotermes darwiniensis) str. MADAR (MADAR_511), Blattabacterium sp. (Cryptocercus punctulatus) str. Cpu (BLBCPU_093), Synechococcus sp. CC9605 (SYNCC9605_1630), Thermus sp. CCB_US3_UF1 (AEV17224.1), Mycoplasma haemocanis str. Illinois (MHC_04355), Streptococcus macedonicus ACA-DC 198 (YBBP), Mycoplasma hyorhinis GDL-1 (MYM_0457), Synechococcus elongatus PCC 7942 (SYNPCC7942_0263), Synechocystis sp. PCC 6803 (SLL0505), Chlamydophila pneumoniae CWL029 (YBBP), Microcoleus chthonoplastes PCC 7420 (MC7420_6818), Persephonella marina EX-H1 (PERMA_1676), Desulfitobacterium hafniense Y51 (DSY4489), Prochlorococcus marinus str. AS9601 (A9601_11971), Flavobacteria bacterium BBFL7 (BBFL7_02553), Sphaerochaeta globus str. Buddy (SPIBUDDY_2293), Sphaerochaeta pleomorpha str. Grapes (SPIGRAPES_2501), Staphylococcus aureus subsp. aureus Mu50 (SAV2163), Streptococcus pyogenes M1 GAS (SPY_1036), Synechococcus sp. WH 8109 (SH8109_2193), Prochlorococcus marinus subsp. marinus str. CCMP1375 (PRO_1104), Prochlorococcus marinus str. MIT 9515 (P9515_11821), Prochlorococcus marinus str. MIT 9301 (P9301_11981), Prochlorococcus marinus str. NATL1A (NATL1_14891), Listeria monocytogenes EGD-e (LM02120), Streptococcus pneumoniae TIGR4 2 seqs SPNET_02000368, SP_1561), Streptococcus pneumoniae R6 (SPR1419), Staphylococcus epidermidis RP62A (SERP1764), Staphylococcus epidermidis ATCC 12228 (SE_1754), Desulfobacterium autotrophicum HRM2 (HRM2_32880), Desulfotalea psychrophila LSv54 (DP1639), Cyanobium sp. PCC 7001 (CPCC7001_1029), Chlamydophila pneumoniae TW-183 (YBBP), Leptospira interrogans serovar Lai str. 56601 (LA_3304), Clostridium perfringens ATCC 13124 (CPF_2660), Thermosynechococcus elongatus BP-1 (TLR1762), Bacillus anthracis str. Ames (BA_0155), Clostridium thermocellum ATCC 27405 (CTHE_1166), Leuconostoc mesenteroides subsp. mesenteroides ATCC 8293 (LEUM_1568), Oenococcus oeni PSU-1 (OEOE_1656), Trichodesmium erythraeum IMS101 (TERY_2433), Tannerella forsythia ATCC 43037 (BFO_1347), Sulfurihydrogenibium azorense Az-Ful (SULAZ_1626), Candidatus Koribacter versatilis Ellin345 (ACID345_0278), Desulfovibrio alaskensis G20 (DDE_1515), Carnobacterium sp. 17-4 (YBBP), Streptococcus mutans UA159 (SMU_1428C), Mycoplasma agalactiae (MAG3060), Streptococcus agalactiae NEM316 (GBS0902), Clostridium tetani E88 (CTC_02549), Ruminococcus champanellensis 18P13 (RUM_14470), Croceibacter atlanticus HTCC2559 (CA2559_13513), Streptococcus uberis 0140J (SUB1092), Chlamydophila abortus S26/3 (CAB642), Lactobacillus plantarum WCFS1 (LP_0818), Oceanobacillus iheyensis HTE831 (0B0230), Synechococcus sp. RS9916 (RS9916_31367), Synechococcus sp. RS9917 (RS9917_00967), Bacillus subtilis subsp. subtilis str. 168 (YBBP), Aquifex aeolicus VF5 (AQ_1467), Borrelia burgdorferi B31 (BB_0008), Enterococcus faecalis V583 (EF_2157), Bacteroides thetaiotaomicron VPI-5482 (BT_3647), Bacillus cereus ATCC 14579 (BC_0186), Chlamydophila caviae GPIC (CCA_00671), Synechococcus sp. CB0101 (SCB01_010100000902), Synechococcus sp. CB0205 (SCB02_010100012692), Candidatus Solibacter usitatus Ellin6076 (ACID_1909), Geobacillus kaustophilus HTA426 (GK0152), Verrucomicrobium spinosum DSM 4136 (VSPID_010100022530), Anabaena variabilis ATCC 29413 (AVA_0913), Porphyromonas gingivalis W83 (PG_1588), Chlamydia muridarum Nigg (TC_0280), Deinococcus radiodurans R1 (DR 0007), Geobacter sulfurreducens PCA 2 seqs GSU1807, GSU0868), Mycoplasma arthritidis 158L3-1 (MARTH_ORF527), Mycoplasma genitalium G37 (MG105), Treponema denticola ATCC 35405 (TDE_1909), Treponema pallidum subsp. pallidum str. Nichols (TP_0826), butyrate-producing bacterium SS3/4 (CK3_23050), Carboxydothermus hydrogenoformans Z-2901 (CHY_2015), Ruminococcus albus 8 (CUS_5386), Streptococcus mitis NCTC 12261 (SM12261_1151), Gloeobacter violaceus PCC 7421 (GLL0109), Lactobacillus johnsonii NCC 533 (LJ_0892), Exiguobacterium sibiricum 255-15 (EXIG_0138), Mycoplasma hyopneumoniae J (MHJ_0485), Mycoplasma synoviae 53 (MS53_0498), Thermus thermophilus HB27 (TT_C1660), Onion yellows Phytoplasma OY-M (PAM_584), Streptococcus thermophilus LMG 18311 (OSSG), Candidatus Protochlamydia amoebophila UWE25 (PC1633), Chlamydophila felis Fe/C-56 (CF0340), Bdellovibrio bacteriovorus HD100 (BD1929), Prevotella ruminicola 23 (PRU_2261), Moorella thermoacetica ATCC 39073 (MOTH_2248), Leptospira interrogans serovar Copenhageni str. Fiocruz L1-130 (LIC_10844), Mycoplasma mobile 163K (MMOB4550), Synechococcus elongatus PCC 6301 (SYC1250_C), Cytophaga hutchinsonii ATCC 33406 (CHU_3222), Geobacter metallireducens GS-15 2 seqs GMET_1888, GMET_1168), Bacillus halodurans C-125 (BH0265), Bacteroides fragilis NCTC 9343 (BF0397), Chlamydia trachomatis D/UW-3/CX (YBBP), Clostridium acetobutylicum ATCC 824 (CA_C3079), Clostridium difficile 630 (CDO110), Lactobacillus acidophilus NCFM (LBA0714), Lactococcus lactis subsp. lactis 111403 (YEDA), Listeria innocua Clip 11262 (LIN2225), Mycoplasma penetrans HF-2 (MYPE2120), Mycoplasma pulmonis UAB CTIP (MYPU_4070), Thermoanaerobacter tengcongensis MB4 (TTE2209), Pediococcus pentosaceus ATCC 25745 (PEPE_0475), Bacillus licheniformis DSM 13=ATCC 14580 2 seqs YBBP, BL02701), Staphylococcus haemolyticus JCSC1435 (SH0877), Desulfuromonas acetoxidans DSM 684 (DACE_0543), Thermodesulfovibrio yellowstonii DSM 11347 (THEYE_A0044), Mycoplasma bovis PG45 (MBOVPG45_0394), Anaeromyxobacter dehalogenans 2CP-C(ADEH_1497), Clostridium beijerinckii NCIMB 8052 (CBEI_0200), Borrelia garinii PBi (BG0008), Symbiobacterium thermophilum IAM 14863 (STH192), Alkaliphilus metalliredigens QYMF (AMET_4313), Thermus thermophilus HB8 (TTHA0323), Coprothermobacter proteolyticus DSM 5265 (COPRO5265_1086), Thermomicrobium roseum DSM 5159 (TRD_0688), Salinibacter ruber DSM 13855 (SRU_1946), Dokdonia donghaensis MED134 (MED134_03354), Polaribacter irgensii 23-P (PI23P_01632), Psychroflexus torquis ATCC 700755 (P700755_02202), Robiginitalea biformata HTCC2501 (RB2501_10597), Polaribacter sp. MED152 (MED152_11519), Maribacter sp. HTCC2170 (FB2170_01652), Microscilla marina ATCC 23134 (M23134_07024), Lyngbya sp. PCC 8106 (L8106_18951), Nodularia spumigena CCY9414 (N9414_23393), Synechococcus sp. BL107 (BL107_11781), Bacillus sp. NRRL B-14911 (B14911_19485), Lentisphaera araneosa HTCC2155 (LNTAR_18800), Lactobacillus sakei subsp. sakei 23K (LCA_1359), Mariprofundus ferrooxydans PV-1 (SPV1_13417), Borrelia hermsii DAH (BH0008), Borrelia turicatae 91E135 (BT0008), Bacillus weihenstephanensis KBAB4 (BCERKBAB4_0149), Bacillus cytotoxicus NVH 391-98 (BCER98_0148), Bacillus pumilus SAFR-032 (YBBP), Geobacter sp. FRC-32 2 seqs GEOB_2309, GEOB_3421), Herpetosiphon aurantiacus DSM 785 (HAUR_3416), Synechococcus sp. RCC307 (SYNRCC307_0791), Synechococcus sp. CC9902 (SYNCC9902_1392), Deinococcus geothermalis DSM 11300 (DGEO_0135), Synechococcus sp. PCC 7002 (SYNPCC7002_A0098), Synechococcus sp. WH 7803 (SYNWH7803_1532), Pedosphaera parvula Ellin514 (CFLAV_PD5552), Synechococcus sp. JA-3-3Ab (CYA_2894), Synechococcus sp. JA-2-3Ba(2-13) (CYB_1645), Aster yellows witches-broom Phytoplasma AYWB (AYWB_243), Paenibacillus sp. JDR-2 (PJDR2_5631), Chloroflexus aurantiacus J-10-fl (CAUR_1577), Lactobacillus gasseri ATCC 33323 (LGAS_1288), Bacillus amyloliquefaciens FZB42 (YBBP), Chloroflexus aggregans DSM 9485 (CAGG_2337), Acaryochloris marina MBIC11017 (AM1_0413), Blattabacterium sp. (Blattella germanica) str. Bge (BLBBGE_101), Simkania negevensis Z (YBBP), Chlamydophila pecorum E58 (G5S_1046), Chlamydophila psittaci 6BC 2 seqs CPSIT_0714, G50_0707), Carnobacterium sp. AT7 (CAT7_06573), Finegoldia magna ATCC 29328 (FMG_1225), Syntrophomonas wolfei subsp. wolfei str. Goettingen (SWOL_2103), Syntrophobacter fumaroxidans MPOB (SFUM_3455), Pelobacter carbinolicus DSM 2380 (PCAR_0999), Pelobacter propionicus DSM 2379 2 seqs PPRO_2640, PPRO_2254), Thermoanaerobacter pseudethanolicus ATCC 33223 (TETH39_0457), Victivallis vadensis ATCC BAA-548 (VVAD_PD2437), Staphylococcus saprophyticus subsp. saprophyticus ATCC 15305 (SSP0722), Bacillus coagulans 36D1 (BCOA_1105), Mycoplasma hominis ATCC 23114 (MHO_0510), Lactobacillus reuteri 100-23 (LREU23DRAFT_3463), Desulfotomaculum reducens MI-1 (DRED_0292), Leuconostoc citreum KM20 (LCK_01297), Paenibacillus polymyxa E681 (PPE_04217), Akkermansia muciniphila ATCC BAA-835 (AMUC_0400), Alkaliphilus oremlandii OhILAs (CLOS_2417), Geobacter uraniireducens Rf4 2 seqs GURA_1367, GURA_2732), Caldicellulosiruptor saccharolyticus DSM 8903 (CSAC_1183), Pyramidobacter piscolens W5455 (HMPREF7215_0074), Leptospira borgpetersenii serovar Hardjo-bovis L550 (LBL_0913), Roseiflexus sp. RS-1 (ROSERS_1145), Clostridium phytofermentans ISDg (CPHY_3551), Brevibacillus brevis NBRC 100599 (BBR47_02670), Exiguobacterium sp. AT1b (EAT1B_1593), Lactobacillus salivarius UCC118 (LSL_1146), Lawsonia intracellularis PHE/MN1-00 (LI0190), Streptococcus mitis B6 (SMI_1552), Pelotomaculum thermopropionicum SI (PTH_0536), Streptococcus pneumoniae D39 (SPD_1392), Candidatus Phytoplasma mali (ATP_00312), Gemmatimonas aurantiaca T-27 (GAU_1394), Hydrogenobaculum sp. Y04AAS1 (HY04AAS1_0006), Roseiflexus castenholzii DSM 13941 (RCAS_3986), Listeria welshimeri serovar 6b str. SLCC5334 (LWE2139), Clostridium novyi NT (NTO1CX_1162), Lactobacillus brevis ATCC 367 (LVIS_0684), Bacillus sp. B14905 (BB14905_08668), Algoriphagus sp. PR1 (ALPR1_16059), Streptococcus sanguinis SK36 (SSA_0802), Borrelia afzelii PKo 2 seqs BAPKO_0007, AEL69242.1), Lactobacillus delbrueckii subsp. bulgaricus ATCC 11842 (LDB0651), Streptococcus suis 05ZYH33 (SSU05_1470), Kordia algicida OT-1 (KAOT1_10521), Pedobacter sp. BAL39 (PBAL39_03944), Flavobacteriales bacterium ALC-1 (FBALC1_04077), Cyanothece sp. CCY0110 (CY0110_30633), Plesiocystis pacifica SIR-1 (PPSIR1_10140), Clostridium cellulolyticum H10 (CCEL_1201), Cyanothece sp. PCC 7425 (CYAN7425_4701), Staphylococcus carnosus subsp. carnosus TM300 (SCA_1665), Bacillus pseudofirmus OF4 (YBBP), Leeuwenhoekiella blandensis MED217 (MED217_04352), Geobacter lovleyi SZ 2 seqs GLOV_3055, GLOV_2524), Streptococcus equi subsp. zooepidemicus (SEZ_1213), Thermosinus carboxydivorans Nor1 (TCARDRAFT 1045), Geobacter bemidjiensis Bem (GBEM 0895), Anaeromyxobacter sp. Fw109-5 (ANAE109_2336), Lactobacillus helveticus DPC 4571 (LHV_0757), Bacillus sp. m3-13 (BM3-1_010100010851), Gramella forsetii KT0803 (GFO_0428), Ruminococcus obeum ATCC 29174 (RUMOBE_03597), Ruminococcus torques ATCC 27756 (RUMTOR_00870), Dorea formicigenerans ATCC 27755 (DORFOR_00204), Dorea longicatena DSM 13814 (DORLON_01744), Eubacterium ventriosum ATCC 27560 (EUBVEN_01080), Desulfovibrio piger ATCC 29098 (DESPIG_01592), Parvimonas micra ATCC 33270 (PEPMIC_01312), Pseudoflavonifractor capillosus ATCC 29799 (BACCAP_01950), Clostridium scindens ATCC 35704 (CLOSCI_02389), Eubacterium hallii DSM 3353 (EUBHAL_01228), Ruminococcus gnavus ATCC 29149 (RUMGNA_03537), Subdoligranulum variabile DSM 15176 (SUBVAR_05177), Coprococcus eutactus ATCC 27759 (COPEUT_01499), Bacteroides ovatus ATCC 8483 (BACOVA_03480), Parabacteroides merdae ATCC 43184 (PARMER_03434), Faecalibacterium prausnitzii A2-165 (FAEPRAA2165_01954), Clostridium sp. L2-50 (CLOL250_00341), Anaerostipes caccae DSM 14662 (ANACAC_00219), Bacteroides caccae ATCC 43185 (BACCAC_03225), Clostridium bolteae ATCC BAA-613 (CLOBOL_04759), Borrelia duttonii Ly (BDU_14), Cyanothece sp. PCC 8801 (PCC8801_0127), Lactococcus lactis subsp. cremoris MG1363 (LLMG_0448), Geobacillus thermodenitrificans NG80-2 (GTNG_0149), Epulopiscium sp. N.t. morphotype B (EPULO_010100003839), Lactococcus garvieae Lg2 (LCGL_0304), Clostridium leptum DSM 753 (CLOLEP_03097), Clostridium spiroforme DSM 1552 (CLOSPI_01608), Eubacterium dolichum DSM 3991 (EUBDOL_00188), Clostridium kluyveri DSM 555 (CKL_0313), Porphyromonas gingivalis ATCC 33277 (PGN_0523), Bacteroides vulgatus ATCC 8482 (BVU_0518), Parabacteroides distasonis ATCC 8503 (BDI_3368), Staphylococcus hominis subsp. hominis C80 (HMPREF0798_01968), Staphylococcus caprae C87 (HMPREF0786_02373), Streptococcus sp. C150 (HMPREF0848_00423), Sulfurihydrogenibium sp. YO3AOP1 (SYO3AOP1_0110), Desulfatibacillum alkenivorans AK-01 (DALK_0397), Bacillus selenitireducens MLS10 (BSEL_0372), Cyanothece sp. ATCC 51142 (CCE_1350), Lactobacillus jensenii 1153 (LBJG_01645), Acholeplasma laidlawii PG-8A (ACL_1368), Bacillus coahuilensis m4-4 (BCOAM_010100001120), Geobacter sp. M18 2 seqs GM18_0792, GM18_2516), Lysinibacillus sphaericus C3-41 (BSPH_4568), Clostridium botulinum NCTC 2916 (CBN_3506), Clostridium botulinum C str. Eklund (CBC_A1575), Alistipes putredinis DSM 17216 (ALIPUT_00190), Anaerofustis stercorihominis DSM 17244 (ANASTE_01539), Anaerotruncus colihominis DSM 17241 (ANACOL_02706), Clostridium bartlettii DSM 16795 (CLOBAR_00759), Clostridium ramosum DSM 1402 (CLORAM_01482), Borrelia valaisiana VS116 (BVAVS116_0007), Sorangium cellulosum So ce 56 (SCE7623), Microcystis aeruginosa NIES-843 (MAE_25390), Bacteroides stercoris ATCC 43183 (BACSTE_02634), Candidatus Amoebophilus asiaticus 5a2 (AASI_0652), Leptospira biflexa serovar Patoc strain Patoc 1 (Paris) (LEPBI_10735), Clostridium sp. 7_2_43FAA (CSBG_00101), Desulfovibrio sp. 3_1_syn3 (HMPREF0326_02254), Ruminococcus sp. 5_1_39BFAA (RSAG_02135), Clostridiales bacterium 1_7_47FAA (CBFG_00347), Bacteroides fragilis 3_112 (BFAG_02578), Natranaerobius thermophilus JW/NM-WN-LF (NTHER_0240), Macrococcus caseolyticus JCSC5402 (MCCL_0321), Streptococcus gordonii str. Challis substr. CH1 (SGO 0887), Dethiosulfovibrio peptidovorans DSM 11002 (DPEP 2062), Coprobacillus sp. 291 (HMPREF9488_03448), Bacteroides coprocola DSM 17136 (BACCOP_03665), Coprococcus comes ATCC 27758 (COPCOM_02178), Geobacillus sp. WCH70 (GWCH70_0156), uncultured Termite group 1 bacterium phylotype Rs-D17 (TGRD_209), Dyadobacter fermentans DSM 18053 (DFER_0224), Bacteroides intestinalis DSM 17393 (BACINT_00700), Ruminococcus lactaris ATCC 29176 (RUMLAC_01257), Blautia hydrogenotrophica DSM 10507 (RUMHYD_01218), Candidatus Desulforudis audaxviator MP104C (DAUD_1932), Marvinbryantia formatexigens DSM 14469 (BRYFOR_07410), Sphaerobacter thermophilus DSM 20745 (STHE_1601), Veillonella parvula DSM 2008 (VPAR_0292), Methylacidiphilum infernorum V4 (MINF_1897), Paenibacillus sp. Y412MC10 (GYMC10_5701), Bacteroides finegoldii DSM 17565 (BACFIN_07732), Bacteroides eggerthii DSM 20697 (BACEGG_03561), Bacteroides pectinophilus ATCC 43243 (BACPEC_02936), Bacteroides plebeius DSM 17135 (BACPLE_00693), Desulfohalobium retbaense DSM 5692 (DRET_1725), Desulfotomaculum acetoxidans DSM 771 (DTOX_0604), Pedobacter heparinus DSM 2366 (PHEP_3664), Chitinophaga pinensis DSM 2588 (CPIN_5466), Flavobacteria bacterium MS024-2A (FLAV2ADRAFT_0090), Flavobacteria bacterium MS024-3C (FLAV3CDRAFT_0851), Moorea producta 3L (LYNGBM3L_14400), Anoxybacillus flavithermus WK1 (AFLV_0149), Mycoplasma fermentans PG18 (MBIO_0474), Chthoniobacter flavus Ellin428 (CFE428DRAFT_3031), Cyanothece sp. PCC 7822 (CYAN7822_1152), Borrelia spielmanii A14S (BSPA14S_0009), Heliobacterium modesticaldum Icel (HM1_1522), Thermus aquaticus Y51MC23 (TAQDRAFT_3938), Clostridium sticklandii DSM 519 (CLOST_0484), Tepidanaerobacter sp. Rel (TEPRE1_0323), Clostridium hiranonis DSM 13275 (CLOHIR_00003), Mitsuokella multacida DSM 20544 (MITSMUL_03479), Haliangium ochraceum DSM 14365 (HOCH_3550), Spirosoma linguale DSM 74 (SLIN_2673), unidentified eubacterium SCB49 (SCB49_03679), Acetivibrio cellulolyticus CD2 (ACELC_020100013845), Lactobacillus buchneri NRRL B-30929 (LBUC_1299), Butyrivibrio crossotus DSM 2876 (BUTYVIB_02056), Candidatus Azobacteroides pseudotrichonymphae genomovar. CFP2 (CFPG_066), Mycoplasma crocodyli MP145 (MCRO_0385), Arthrospira maxima CS-328 (AMAXDRAFT_4184), Eubacterium eligens ATCC 27750 (EUBELI_01626), Butyrivibrio proteoclasticus B316 (BPR_12587), Chloroherpeton thalassium ATCC 35110 (CTHA_1340), Eubacterium biforme DSM 3989 (EUBIFOR_01794), Rhodothermus marinus DSM 4252 (RMAR_0146), Borrelia bissettii DN127 (BBIDN127_0008), Capnocytophaga ochracea DSM 7271 (COCH_2107), Alicyclobacillus acidocaldarius subsp. acidocaldarius DSM 446 (AACI_2672), Caldicellulosiruptor bescii DSM 6725 (ATHE_0361), Denitrovibrio acetiphilus DSM 12809 (DACET_1298), Desulfovibrio desulfuricans subsp. desulfuricans str. ATCC 27774 (DDES_1715), Anaerococcus lactolyticus ATCC 51172 (HMPREF0072_1645), Anaerococcus tetradius ATCC 35098 (HMPREF0077_0902), Finegoldia magna ATCC 53516 (HMPREF0391_10377), Lactobacillus antri DSM 16041 (YBBP), Lactobacillus buchneri ATCC 11577 (HMPREF0497_2752), Lactobacillus ultunensis DSM 16047 (HMPREF0548_0745), Lactobacillus vaginalis ATCC 49540 (HMPREF0549_0766), Listeria grayi DSM 20601 (HMPREF055611652), Sphingobacterium spiritivorum ATCC 33861 (HMPREF0766_11787), Staphylococcus epidermidis M23864:W1 (HMPREF0793_0092), Streptococcus equinus ATCC 9812 (HMPREF0819_0812), Desulfomicrobium baculatum DSM 4028 (DBAC_0255), Thermanaerovibrio acidaminovorans DSM 6589 (TACI_0837), Thermobaculum terrenum ATCC BAA-798 (TTER_1817), Anaerococcus prevotii DSM 20548 (APRE_0370), Desulfovibrio salexigens DSM 2638 (DESAL_1795), Brachyspira murdochii DSM 12563 (BMUR_2186), Meiothermus silvanus DSM 9946 (MESIL_0161), Bacillus cereus Rock4-18 (BCERE0024_1410), Cylindrospermopsis raciborskii CS-505 (CRC_01921), Raphidiopsis brookii D9 (CRD_01188), Clostridium carboxidivorans P7 2 seqs CLCAR_0016, CCARBDRAFT_4266), Clostridium botulinum E1 str. BoNT E Beluga (CLO_3490), Blautia hansenii DSM 20583 (BLAHAN_07155), Prevotella copri DSM 18205 (PREVCOP_04867), Clostridium methylpentosum DSM 5476 (CLOSTMETH_00084), Lactobacillus casei BL23 (LCABL_11800), Bacillus megaterium QM B1551 (BMQ_0195), Treponema primitia ZAS-2 (TREPR_1936), Treponema azotonutricium ZAS-9 (TREAZ_0147), Holdemania filiformis DSM 12042 (HOLDEFILI_03810), Filifactor alocis ATCC 35896 (HMPREF0389_00366), Gemella haemolysans ATCC 10379 (GEMHA0001_0912), Selenomonas sputigena ATCC 35185 (SELSP_1610), Veillonella dispar ATCC 17748 (VEIDISOL_01845), Deinococcus deserti VCD115 (DEIDE_19700), Bacteroides coprophilus DSM 18228 (BACCOPRO_00159), Nostoc azollae 0708 (AAZO_4735), Erysipelotrichaceae bacterium 5_2_54FAA (HMPREF0863_02273), Ruminococcaceae bacterium D16 (HMPREF0866_01061), Prevotella bivia JCVIHMPO10 (HMPREF0648_0338), Prevotella melaninogenica ATCC 25845 (HMPREF0659_A6212), Porphyromonas endodontalis ATCC 35406 (POREN0001_0251), Capnocytophaga sputigena ATCC 33612 (CAPSP0001_0727), Capnocytophaga gingivalis ATCC 33624 (CAPGI0001_1936), Clostridium hylemonae DSM 15053 (CLOHYLEM_04631), Thermosediminibacter oceani DSM 16646 (TOCE_1970), Dethiobacter alkaliphilus AHT 1 (DEALDRAFT_0231), Desulfonatronospira thiodismutans AS03-1 (DTHIO_PD2806), Clostridium sp. D5 (HMPREF0240_03780), Anaerococcus hydrogenalis DSM 7454 (ANHYDRO_01144), Kyrpidia tusciae DSM 2912 (BTUS_0196), Gemella haemolysans M341 (HMPREF0428_01429), Gemella morbillorum M424 (HMPREF0432_01346), Gemella sanguinis M325 (HMPREF0433_01225), Prevotella oris C735 (HMPREF0665_01741), Streptococcus sp. M143 (HMPREF0850_00109), Streptococcus sp. M334 (HMPREF0851_01652), Bilophila wadsworthia 3_1_6 (HMPREF0179_00899), Brachyspira hyodysenteriae WA1 (BHWA1_01167), Enterococcus gallinarum EG2 (EGBG_00820), Enterococcus casseliflavus EC20 (ECBG_00827), Enterococcus faecium C68 (EFXG_01665), Syntrophus aciditrophicus SB (SYN_02762), Lactobacillus rhamnosus GG 2 seqs OSSG, LRHM_0937), Acidaminococcus intestini RyC-MR95 (ACIN_2069), Mycoplasma conjunctivae HRC/581 (MCJ_002940), Halanaerobium praevalens DSM 2228 (HPRAE_1647), Aminobacterium colombiense DSM 12261 (AMICO_0737), Clostridium cellulovorans 743B (CLOCEL_3678), Desulfovibrio magneticus RS-1 (DMR_25720), Spirochaeta smaragdinae DSM 11293 (SPIRS_1647), Bacteroidetes oral taxon 274 str. F0058 (HMPREF0156_01826), Lachnospiraceae oral taxon 107 str. F0167 (HMPREF049101238), Lactobacillus coleohominis 101-4-CHN (HMPREF0501_01094), Lactobacillus jensenii 27-2-CHN (HMPREF0525_00616), Prevotella buccae D17 (HMPREF0649 02043), Prevotella sp. oral taxon 299 str. F0039 (HMPREF0669_01041), Prevotella sp. oral taxon 317 str. F0108 (HMPREF0670_02550), Desulfobulbus propionicus DSM 2032 2 seqs DESPR_2503, DESPR_1053), Thermoanaerobacterium thermosaccharolyticum DSM 571 (TTHE_0484), Thermoanaerobacter italicus Ab9 (THIT_1921), Thermovirga lienii DSM 17291 (TLIE_0759), Aminomonas paucivorans DSM 12260 (APAU_1274), Streptococcus mitis SK321 (SMSK321_0127), Streptococcus mitis SK597 (SMSK597_0417), Roseburia hominis A2-183 (RHOM_12405), Oribacterium sinus F0268 (HMPREF6123_0887), Prevotella bergensis DSM 17361 (HMPREF0645_2701), Selenomonas noxia ATCC 43541 (YBBP), Weissella paramesenteroides ATCC 33313 (HMPREF0877_0011), Lactobacillus amylolyticus DSM 11664 (HMPREF0493_1017), Bacteroides sp. D20 (HMPREF0969_02087), Clostridium papyrosolvens DSM 2782 (CPAP_3968), Desulfurivibrio alkaliphilus AHT2 (DAAHT2_0445), Acidaminococcus fermentans DSM 20731 (ACFER_0601), Abiotrophia defectiva ATCC 49176 (GCWU000182_00063), Anaerobaculum hydrogeniformans ATCC BAA-1850 (HMPREF1705_01115), Catonella morbi ATCC 51271 (GCWU000282_00629), Clostridium botulinum D str. 1873 (CLG_B1859), Dialister invisus DSM 15470 (GCWU000321_01906), Fibrobacter succinogenes subsp. succinogenes S85 2 seqs FSU_0028, FISUC_2776), Desulfovibrio fructosovorans JJ (DESFRDRAFT_2879), Peptostreptococcus stomatis DSM 17678 (HMPREF0634_0727), Staphylococcus warneri L37603 (STAWA0001_0094), Treponema vincentii ATCC 35580 (TREVI0001_1289), Porphyromonas uenonis 60-3 (PORUE0001_0199), Peptostreptococcus anaerobius 653-L (HMPREF0631_1228), Peptoniphilus lacrimalis 315-B (HMPREF0628_0762), Candidatus Phytoplasma australiense (PA0090), Prochlorococcus marinus subsp. pastoris str. CCMP1986 (PMM1091), Synechococcus sp. WH 7805 (WH7805_04441), Blattabacterium sp. (Periplaneta americana) str. BPLAN (BPLAN_534), Caldicellulosiruptor obsidiansis OB47 (COB47_0325), Oribacterium sp. oral taxon 078 str. F0262 (GCWU000341_01365), Hydrogenobacter thermophilus TK-6 2 seqs ADO46034.1, HTH_1665), Clostridium saccharolyticum WM1 (CLOSA_1248), Prevotella sp. oral taxon 472 str. F0295 (HMPREF6745_1617), Paenibacillus sp. oral taxon 786 str. D14 (POTG_03822), Roseburia inulinivorans DSM 16841 2 seqs ROSEINA2194_02614, ROSEINA2194_02613), Granulicatella elegans ATCC 700633 (HMPREF0446_01381), Prevotella tannerae ATCC 51259 (GCWU000325_02844), Shuttleworthia satelles DSM 14600 (GCWU000342_01722), Phascolarctobacterium succinatutens YIT 12067 (HMPREF9443_01522), Clostridium butyricum E4 str. BoNT E BL5262 (CLP_3980), Caldicellulosiruptor hydrothermalis 108 (CALHY_2287), Caldicellulosiruptor kristjanssonii 177R1B (CALKR_0314), Caldicellulosiruptor owensensis OL (CALOW_0228), Eubacterium cellulosolvens 6 (EUBCEDRAFT_1150), Geobacillus thermoglucosidasius C56-YS93 (GEOTH_0175), Thermincola potens JR (THERJR_0376), Nostoc punctiforme PCC 73102 (NPUN_F5990), Granulicatella adiacens ATCC 49175 (YBBP), Selenomonas flueggei ATCC 43531 (HMPREF0908_1366), Thermocrinis albus DSM 14484 (THAL_0234), Deferribacter desulfuricans SSM1 (DEFDS_1031), Ruminococcus flavefaciens FD-1 (RFLAF_010100012444), Desulfovibrio desulfuricans ND132 (DND1320877), Clostridium lentocellum DSM 5427 (CLOLE_3370), Desulfovibrio aespoeensis Aspo-2 (DAES_1257), Syntrophothermus lipocalidus DSM 12680 (SLIP 2139), Marivirga tractuosa DSM 4126 (FTRAC_3720), Desulfarculus baarsii DSM 2075 (DEBA_0764), Synechococcus sp. CC9311 (SYNC_1030), Thermaerobacter marianensis DSM 12885 (TMAR_0236), Desulfovibrio sp. FW1012B (DFW101_0480), Jonquetella anthropi E3_33 E1 (GCWU000246_01523), Syntrophobotulus glycolicus DSM 8271 (SGLY_0483), Thermovibrio ammonificans HB-1 (THEAM_0892), Truepera radiovictrix DSM 17093 (TRAD_1704), Bacillus cellulosilyticus DSM 2522 (BCELL_0170), Prevotella veroralis F0319 (HMPREF0973_02947), Erysipelothrix rhusiopathiae str. Fujisawa (ERH_0115), Desulfurispirillum indicum S5 (SELIN_2326), Cyanothece sp. PCC 7424 (PCC7424_0843), Anaerococcus vaginalis ATCC 51170 (YBBP), Aerococcus viridans ATCC 11563 (YBBP), Streptococcus oralis ATCC 35037 2 seqs HMPREF8579_1682, SMSK23_1115), Zunongwangia profunda SM-A87 (ZPR_0978), Halanaerobium hydrogeniformans (HALSA_1882), Bacteroides xylanisolvens XB1A (BXY_29650), Ruminococcus torques L2-14 (RTO_16490), Ruminococcus obeum A2-162 (CK5_33600), Eubacterium rectale DSM 17629 (EUR_24910), Faecalibacterium prausnitzii SL3/3 (FPR_27630), Ruminococcus sp. SR1/5 (CK1_39330), Lachnospiraceae bacterium 3_1_57FAA_CT1 (HMPREF0994_01490), Lachnospiraceae bacterium 9_1_43BFAA (HMPREF0987_01591), Lachnospiraceae bacterium 1_4_56FAA (HMPREF0988_01806), Erysipelotrichaceae bacterium 3_1_53 (HMPREF0983_01328), Ethanoligenens harbinense YUAN-3 (ETHHA_1605), Streptococcus dysgalactiae subsp. dysgalactiae ATCC 27957 (SDD27957_06215), Spirochaeta thermophila DSM 6192 (STHERM_C18370), Bacillus sp. 2_A_57_CT2 (HMPREF1013_05449), Bacillus clausii KSM-K16 (ABC0241), Thermodesulfatator indicus DSM 15286 (THEIN_0076), Bacteroides salanitronis DSM 18170 (BACSA_1486), Oceanithermus profundus DSM 14977 (OCEPR_2178), Prevotella timonensis CRIS 5C-B1 (HMPREF9019_2028), Prevotella buccalis ATCC 35310 (HMPREF0650_0675), Prevotella amnii CRIS 21A-A (HMPREF9018_0365), Bulleidia extructa W1219 (HMPREF9013_0078), Bacteroides coprosuis DSM 18011 (BCOP_0558), Prevotella multisaccharivorax DSM 17128 (PREMU_0839), Cellulophaga algicola DSM 14237 (CELAL_0483), Synechococcus sp. WH 5701 (WH5701_10360), Desulfovibrio africanus str. Walvis Bay (DESAF_3283), Oscillibacter valericigenes Sjm18-20 (OBV_23340), Deinococcus proteolyticus MRP (DEIPR_0134), Bacteroides helcogenes P 36-108 (BACHE_0366), Paludibacter propionicigenes WB4 (PALPR_1923), Desulfotomaculum nigrificans DSM 574 (DESNIDRAFT_2093), Arthrospira platensis NIES-39 (BA189442.1), Mahella australiensis 50-1 BON (MAHAU_1846), Thermoanaerobacter wiegelii Rt8.B1 (THEWI_2191), Ruminococcus albus 7 (RUMAL_2345), Staphylococcus lugdunensis HKU09-01 (SLGD_00862), Megasphaera genomosp. type_1 str. 28L (HMPREF0889_1099), Clostridiales genomosp. BVAB3 str. UPII9-5 (HMPREF0868_1453), Pediococcus claussenii ATCC BAA-344 (PECL_571), Prevotella oulorum F0390 (HMPREF9431_01673), Turicibacter sanguinis PC909 (CUW_0305), Listeria seeligeri FSL N1-067 (NT03LS_2473), Solobacterium moorei F0204 (HMPREF9430_01245), Megasphaera micronuciformis F0359 (HMPREF9429_00929), Capnocytophaga sp. oral taxon 329 str. F0087 2 seqs HMPREF9074_00867, HMPREF907401078), Streptococcus anginosus F0211 (HMPREF081300157), Mycoplasma suis KI3806 (MSUI04040), Mycoplasma gallisepticum str. F (MGF_2771), Deinococcus maricopensis DSM 21211 (DEIMA 0651), Odoribacter splanchnicus DSM 20712 (ODOSP_0239), Lactobacillus fermentum CECT 5716 (LC40_0265), Lactobacillus iners AB-1 (LINEA_010100006089), cyanobacterium UCYN-A (UCYN_03150), Lactobacillus sanfranciscensis TMW 1.1304 (YBBP), Mucilaginibacter paludis DSM 18603 (MUCPA_1296), Lysinibacillus fusiformis ZC1 (BFZC1_03142), Paenibacillus vortex V453 (PVOR_30878), Waddlia chondrophila WSU 86-1044 (YBBP), Flexistipes sinusarabici DSM 4947 (FLEXSI_0971), Paenibacillus curdlanolyticus YK9 (PAECUDRAFT_1888), Clostridium cf. saccharolyticum K10 (CLS_03290), Alistipes shahii WAL 8301 (AL1_02190), Eubacterium cylindroides T2-87 (EC1_00230), Coprococcus catus GD/7 (CC1_32460), Faecalibacterium prausnitzii L2-6 (FP2_09960), Clostridium clariflavum DSM 19732 (CLOCL_2983), Bacillus atrophaeus 1942 (BATR1942_19530), Mycoplasma pneumoniae FH (MPNE_0277), Lachnospiraceae bacterium 2_1_46FAA (HMPREF9477_00058), Clostridium symbiosum WAL-14163 (HMPREF9474_01267), Dysgonomonas gadei ATCC BAA-286 (HMPREF9455_02764), Dysgonomonas mossii DSM 22836 (HMPREF9456_00401), Thermus scotoductus SA-01 (TSC_C24350), Sphingobacterium sp. 21 (SPH21_1233), Spirochaeta caldaria DSM 7334 (SPICA_1201), Prochlorococcus marinus str. MIT 9312 (PMT9312_1102), Prochlorococcus marinus str. MIT 9313 (PMT_1058), Faecalibacterium cf. prausnitzii KLE1255 (HMPREF9436_00949), Lactobacillus crispatus ST1 (LCRIS_00721), Clostridium ljungdahlii DSM 13528 (CLJU_C40470), Prevotella bryantii B14 (PBR_2345), Treponema phagedenis F0421 (HMPREF9554_02012), Clostridium sp. BNL1100 (CLO1100_2851), Microcoleus vaginatus FGP-2 (MICVADRAFT_1377), Brachyspira pilosicoli 95/1000 (BP951000_0671), Spirochaeta coccoides DSM 17374 (SPICO_1456), Haliscomenobacter hydrossis DSM 1100 (HALHY_5703), Desulfotomaculum kuznetsovii DSM 6115 (DESKU_2883), Runella slithyformis DSM 19594 (RUNSL_2859), Leuconostoc kimchii IMSNU 11154 (LKI_08080), Leuconostoc gasicomitatum LMG 18811 (OSSG), Pedobacter saltans DSM 12145 (PEDSA_3681), Paraprevotella xylaniphila YIT 11841 (HMPREF9442_00863), Bacteroides clarus YIT 12056 (HMPREF9445_01691), Bacteroides fluxus YIT 12057 (HMPREF9446_03303), Streptococcus urinalis 2285-97 (STRUR_1376), Streptococcus macacae NCTC 11558 (STRMA_0866), Streptococcus ictaluri 707-05 (STRIC_0998), Oscillochloris trichoides DG-6 (OSCT_2821), Parachlamydia acanthamoebae UV-7 (YBBP), Prevotella denticola F0289 (HMPREF9137_0316), Parvimonas sp. oral taxon 110 str. F0139 (HMPREF9126_0534), Calditerrivibrio nitroreducens DSM 19672 (CALNI_1443), Desulfosporosinus orientis DSM 765 (DESOR_0366), Streptococcus mitis bv. 2 str. F0392 (HMPREF9178_0602), Thermodesulfobacterium sp. OPB45 (TOPB45_1366), Synechococcus sp. WH 8102 (SYNW0935), Thermoanaerobacterium xylanolyticum LX-11 (THEXY_0384), Mycoplasma haemofelis Ohio2 (MHF_1192), Capnocytophaga canimorsus Cc5 (CCAN_16670), Pediococcus acidilactici DSM 20284 (HMPREF0623_1647), Prevotella marshii DSM 16973 (HMPREF0658_1600), Peptoniphilus duerdenii ATCC BAA-1640 (HMPREF9225_1495), Bacteriovorax marinus SJ (BMS_2126), Selenomonas sp. oral taxon 149 str. 67H29BP (HMPREF9166_2117), Eubacterium yurii subsp. margaretiae ATCC 43715 (HMPREF0379_1170), Streptococcus mitis ATCC 6249 (HMPREF8571_1414), Streptococcus sp. oral taxon 071 str. 73H25AP (HMPREF91890416), Prevotella disiens FB035-09AN (HMPREF92961148), Aerococcus urinae ACS-120-V-Col10a (HMPREF9243_0061), Veillonella atypica ACS-049-V-Sch6 (HMPREF9321_0282), Cellulophaga lytica DSM 7489 (CELLY_2319), Thermaerobacter subterraneus DSM 13965 (THESUDRAFT_0411), Desulfurobacterium thermolithotrophum DSM 11699 (DESTER_0391), Treponema succinifaciens DSM 2489 (TRESU_1152), Marinithermus hydrothermalis DSM 14884 (MARKY_1861), Streptococcus infantis SK1302 (SIN_0824), Streptococcus parauberis NCFD 2020 (SPB_0808), Streptococcus porcinus str. Jelinkova 176 (STRPO_0164), Streptococcus criceti HS-6 (STRCR_1133), Capnocytophaga ochracea F0287 (HMPREF1977_0786), Prevotella oralis ATCC 33269 (HMPREF0663_10671), Porphyromonas asaccharolytica DSM 20707 (PORAS_0634), Anaerococcus prevotii ACS-065-V-Col13 (HMPREF9290_0962), Peptoniphilus sp. oral taxon 375 str. F0436 (HMPREF9130_1619), Veillonella sp. oral taxon 158 str. F0412 (HMPREF9199_0189), Selenomonas sp. oral taxon 137 str. F0430 (HMPREF9162_2458), Cyclobacterium marinum DSM 745 (CYCMA_2525), Desulfobacca acetoxidans DSM 11109 (DESAC_1475), Listeria ivanovii subsp. ivanovii PAM 55 (LIV_2111), Desulfovibrio vulgaris str. Hildenborough (DVU_1280), Desulfovibrio vulgaris str. ‘Miyazaki F’ (DVMF_0057), Muricauda ruestringensis DSM 13258 (MURRU_0474), Leuconostoc argentinum KCTC 3773 (LARGK3_010100008306), Paenibacillus polymyxa SC2 (PPSC2_C4728), Eubacterium saburreum DSM 3986 (HMPREF0381_2518), Pseudoramibacter alactolyticus ATCC 23263 (HMP0721_0313), Streptococcus parasanguinis ATCC 903 (HMPREF8577_0233), Streptococcus sanguinis ATCC 49296 (HMPREF8578_1820), Capnocytophaga sp. oral taxon 338 str. F0234 (HMPREF9071_1325), Centipeda periodontii DSM 2778 (HMPREF9081_2332), Prevotella multiformis DSM 16608 (HMPREF9141_0346), Streptococcus peroris ATCC 700780 (HMPREF9180_0434), Prevotella salivae DSM 15606 (HMPREF9420_1402), Streptococcus australis ATCC 700641 2 seqs HMPREF9961_0906, HMPREF9421_1720), Streptococcus cristatus ATCC 51100 2 seqs HMPREF9422_0776, HMPREF9960_0531), Lactobacillus acidophilus 30SC (LAC30SC_03585), Eubacterium limosum KIST612 (ELI_0726), Streptococcus downei F0415 (HMPREF9176_1204), Streptococcus sp. oral taxon 056 str. F0418 (HMPREF9182_0330), Oribacterium sp. oral taxon 108 str. F0425 (HMPREF9124_1289), Streptococcus vestibularis F0396 (HMPREF9192_1521), Treponema brennaborense DSM 12168 (TREBR_1165), Leuconostoc fallax KCTC 3537 (LFALK3_010100008689), Eremococcus coleocola ACS-139-V-Col8 (HMPREF9257_0233), Peptoniphilus harei ACS-146-V-Sch2b (HMPREF9286_0042), Clostridium sp. HGF2 (HMPREF9406_3692), Alistipes sp. HGB5 (HMPREF9720_2785), Prevotella dentalis DSM 3688 (PREDE_0132), Streptococcus pseudoporcinus SPIN 20026 (HMPREF9320_0643), Dialister microaerophilus UPII 345-E (HMPREF9220_0018), Weissella cibaria KACC 11862 (WCIBK1_010100001174), Lactobacillus coryniformis subsp. coryniformis KCTC 3167 (LCORCK3_010100001982), Synechococcus sp. PCC 7335 (S7335_3864), Owenweeksia hongkongensis DSM 17368 (OWEHO_3344), Anaerolinea thermophila UNI-1 (ANT_09470), Streptococcus oralis Uo5 (SOR_0619), Leuconostoc gelidum KCTC 3527 (LGELK3_010100006746), Clostridium botulinum BKT015925 (CBC4_0275), Prochlorococcus marinus str. MIT 9211 (P921110951), Prochlorococcus marinus str. MIT 9215 (P921512271), Staphylococcus aureus subsp. aureus NCTC 8325 (SAOUHSC_02407), Staphylococcus aureus subsp. aureus COL (SACOL2153), Lactobacillus animalis KCTC 3501 (LANIK3_010100000290), Fructobacillus fructosus KCTC 3544 (FFRUK3_010100006750), Acetobacterium woodii DSM 1030 (AWO_C28200), Planococcus donghaensis MPA1U2 (GPDM_12177), Lactobacillus farciminis KCTC 3681 (LFARK3_010100009915), Melissococcus plutonius ATCC 35311 (MPTP_0835), Lactobacillus fructivorans KCTC 3543 (LFRUK3_010100002657), Paenibacillus sp. HGF7 (HMPREF9413_5563), Lactobacillus oris F0423 (HMPREF9102_1081), Veillonella sp. oral taxon 780 str. F0422 (HMPREF9200_1112), Parvimonas sp. oral taxon 393 str. F0440 (HMPREF9127_1171), Tetragenococcus halophilus NBRC 12172 (TEH13100), Candidatus Chloracidobacterium thermophilum B (CABTHER_A1277), Ornithinibacillus scapharcae TW25 (OTW25_010100020393), Lacinutrix sp. 5H-3-7-4 (LACAL_0337), Krokinobacter sp. 4H-3-7-5 (KRODI_0177), Staphylococcus pseudintermedius ED99 (SPSE_0659), Staphylococcus aureus subsp. aureus MSHR1132 (CCE59824.1), Paenibacillus terrae HPL-003 (HPL003_03660), Caldalkalibacillus thermarum TA2.A1 (CATHTA2_0882), Desmospora sp. 8437 (HMPREF9374_2897), Prevotella nigrescens ATCC 33563 (HMPREF9419_1415), Prevotella pallens ATCC 700821 (HMPREF9144_0175), Streptococcus infantis X (HMPREF1124).

[0247] In some embodiments, the genetically engineered bacteria are capable of increasing c-di-AMP levels. In some embodiments, the genetically engineered bacteria are capable of increasing c-diAMP levels in the intracellular space. In some embodiments, the genetically engineered bacteria are capable of increasing c-diAMP levels inside of a eukaryotic cell. In some embodiments, the genetically engineered bacteria are capable of increasing c-diAMP levels inside of an immune cell. In some embodiments, the cell is a phagocyte. In some embodiments, the cell is a macrophage. In some embodiments, the cell is a dendritic cell. In some embodiments, the cell is a neutrophil. In some embodiments, the cell is a MDSC. In some embodiments, the genetically engineered bacteria are capable of increasing c-GAMP (2′3′ or 3′3′) and/or cyclic-di-GMP levels inside of a cell. In some embodiments, the genetically engineered bacteria are capable of increasing c-di-AMP levels in vitro in the bacterial cell and/or in the growth medium.

[0248] In any of these embodiments, the bacteria genetically engineered to produce cyclic-di-AMP produce at least about 0% to 2% to 4%, 4% to 6%, 6% to 8%, 8% to 10%, 10% to 12%, 12% to 14%, 14% to 16%, 16% to 18%, 18% to 20%, 20% to 25%, 25% to 30%, 30% to 35%, 35% to 40%, 40% to 45% 45% to 50%, 50% to 55%, 55% to 60%, 60% to 65%, 65% to 70% to 80%, 80% to 90%, or 90% to 100% more cyclic-di-AMP than unmodified bacteria of the same bacterial subtype under the same conditions. In yet another embodiment, the genetically engineered bacteria produce at least about 0 to 1.0-fold, 1.0-1.2-fold, 1.2-1.4-fold, 1.4-1.6-fold, 1.6-1.8-fold, 1.8-2-fold, or two-fold more cyclic-di-AMP than unmodified bacteria of the same bacterial subtype under the same conditions. In yet another embodiment, the genetically engineered bacteria produce at least about 2 to 3-fold, 3 to 4-fold, 4 to 5-fold, 5 to 6-fold, 6 to 7-fold, 7 to 8-fold, 8 to 9-fold, 9 to 10-fold, 10 to 15-fold, 15 to 20-fold, 20 to 30-fold, 30 to 40-fold, or 40 to 50-fold, 50 to 100-fold, 100 to 500-fold, or 500 to 1000-fold or more cyclic-di-AMP than unmodified bacteria of the same bacterial subtype under the same conditions.

[0249] In any of these embodiments, the bacteria genetically engineered to produce cyclic-di-AMP consume at least about 0% to 2% to 4%, 4% to 6%, 6% to 8%, 8% to 10%, 10% to 12%, 12% to 14%, 14% to 16%, 16% to 18%, 18% to 20%, 20% to 25%, 25% to 30%, 30% to 35%, 35% to 40%, 40% to 45% 45% to 50%, 50% to 55%, 55% to 60%, 60% to 65%, 65% to 70% to 80%, 80% to 90%, or 90% to 100% more ATP than unmodified bacteria of the same bacterial subtype under the same conditions. In yet another embodiment, the genetically engineered bacteria consume at least about 0 to 1.0-fold, 1.0-1.2-fold, 1.2-1.4-fold, 1.4-1.6-fold, 1.6-1.8-fold, 1.8-2-fold, or two-fold more ATP than unmodified bacteria of the same bacterial subtype under the same conditions. In yet another embodiment, the genetically engineered bacteria produce at least about 2 to 3-fold, 3 to 4-fold, 4 to 5-fold, 5 to 6-fold, 6 to 7-fold, 7 to 8-fold, 8 to 9-fold, 9 to 10-fold, 10 to 15-fold, 15 to 20-fold, 20 to 30-fold, 30 to 40-fold, or 40 to 50-fold, 50 to 100-fold, 100 to 500-fold, or 500 to 1000-fold or more cyclic-di-AMP than unmodified bacteria of the same bacterial subtype under the same conditions.

[0250] In any of these embodiments, the bacteria genetically engineered to produce cyclic-di-GAMP produce at least about 0% to 2% to 4%, 4% to 6%, 6% to 8%, 8% to 10%, 10% to 12%, 12% to 14%, 14% to 16%, 16% to 18%, 18% to 20%, 20% to 25%, 25% to 30%, 30% to 35%, 35% to 40%, 40% to 45% 45% to 50%, 50% to 55%, 55% to 60%, 60% to 65%, 65% to 70% to 80%, 80% to 90%, or 90% to 100% more arginine than unmodified bacteria of the same bacterial subtype under the same conditions. In yet another embodiment, the genetically engineered bacteria produce at least about 0 to 1.0-fold, 1.0-1.2-fold, 1.2-1.4-fold, 1.4-1.6-fold, 1.6-1.8-fold, 1.8-2-fold, or two-fold more cyclic-di-GAMP than unmodified bacteria of the same bacterial subtype under the same conditions. In yet another embodiment, the genetically engineered bacteria produce at least about 2 to 3-fold, 3 to 4-fold, 4 to 5-fold, 5 to 6-fold, 6 to 7-fold, 7 to 8-fold, 8 to 9-fold, 9 to 10-fold, 10 to 15-fold, 15 to 20-fold, 20 to 30-fold, 30 to 40-fold, or 40 to 50-fold, 50 to 100-fold, 100 to 500-fold, or 500 to 1000-fold or more cyclic-di-GAMP than unmodified bacteria of the same bacterial subtype under the same conditions.

[0251] In any of these embodiments, the bacteria genetically engineered to produce cyclic-di-GAMP consume at least about 0% to 2% to 4%, 4% to 6%, 6% to 8%, 8% to 10%, 10% to 12%, 12% to 14%, 14% to 16%, 16% to 18%, 18% to 20%, 20% to 25%, 25% to 30%, 30% to 35%, 35% to 40%, 40% to 45% 45% to 50%, 50% to 55%, 55% to 60%, 60% to 65%, 65% to 70% to 80%, 80% to 90%, or 90% to 100% more ATP than unmodified bacteria of the same bacterial subtype under the same conditions. In yet another embodiment, the genetically engineered bacteria consume at least about 0 to 1.0-fold, 1.0-1.2-fold, 1.2-1.4-fold, 1.4-1.6-fold, 1.6-1.8-fold, 1.8-2-fold, or two-fold more ATP and/or GTP than unmodified bacteria of the same bacterial subtype under the same conditions. In yet another embodiment, the genetically engineered bacteria consume at least about 2 to 3-fold, 3 to 4-fold, 4 to 5-fold, 5 to 6-fold, 6 to 7-fold, 7 to 8-fold, 8 to 9-fold, 9 to 10-fold, 10 to 15-fold, 15 to 20-fold, 20 to 30-fold, 30 to 40-fold, or 40 to 50-fold, 50 to 100-fold, 100 to 500-fold, or 500 to 1000-fold or more ATP and/or GTP than unmodified bacteria of the same bacterial subtype under the same conditions.

[0252] In any of these embodiments, the genetically engineered bacteria increase STING agonist production rate by at least about 0% to 2% to 4%, 4% to 6%, 6% to 8%, 8% to 10%, 10% to 12%, 12% to 14%, 14% to 16%, 16% to 18%, 18% to 20%, 20% to 25%, 25% to 30%, 30% to 35%, 35% to 40%, 40% to 45% 45% to 50%, 50% to 55%, 55% to 60%, 60% to 65%, 65% to 70% to 80%, 80% to 90%, or 90% to 100% relative to unmodified bacteria of the same bacterial subtype under the same conditions. In yet another embodiment, the genetically engineered bacteria increase the STING agonist production rate by at least about 0 to 1.0-fold, 1.0-1.2-fold, 1.2-1.4-fold, 1.4-1.6-fold, 1.6-1.8-fold, 1.8-2-fold, or two-fold more relative to unmodified bacteria of the same bacterial subtype under the same conditions. In yet another embodiment, the genetically engineered bacteria increase STING agonist production rate by about three-fold, four-fold, five-fold, six-fold, seven-fold, eight-fold, nine-fold, ten-fold, fifteen-fold, twenty-fold, thirty-fold, forty-fold, or fifty-fold, hundred-fold, five hundred-fold, or one-thousand-fold relative to unmodified bacteria of the same bacterial subtype under the same conditions.

[0253] In one embodiment, the genetically engineered bacteria increase STING agonist production by at least about 80% to 100% relative to unmodified bacteria of the same bacterial subtype under the same conditions, after 4 hours. In one embodiment, the genetically engineered bacteria increase STING agonist production by at least about 90% to 100% relative to unmodified bacteria of the same bacterial subtype under the same conditions after 4 hours. In one specific embodiment, the genetically engineered bacteria increase STING agonist production by at least about 95% to 100% relative to unmodified bacteria of the same bacterial subtype under the same conditions, after 4 hours. In one specific embodiment, the genetically engineered bacteria increase the STING agonist production by at least about 99% to 100% relative to unmodified bacteria of the same bacterial subtype under the same conditions, after 4 hours. In yet another embodiment, the genetically engineered bacteria increase the STING agonist production by at least about 10-50 fold after 4 hours. In yet another embodiment, the genetically engineered bacteria increase STING agonist production by at least about 50-100 fold after 4 hours. In yet another embodiment, the genetically engineered bacteria increase STING agonist production by at least about 100-500 fold after 4 hours. In yet another embodiment, the genetically engineered bacteria increase STING agonist production by at least about 500-1000 fold after 4 hours. In yet another embodiment, the genetically engineered bacteria increase the STING agonist production by at least about 1000-5000 fold after 4 hours. In yet another embodiment, the genetically engineered bacteria increase the STING agonist production by at least about 5000-10000 fold after 4 hours. In yet another embodiment, the genetically engineered bacteria increase STING agonist production by at least about 10000-1000 fold after 4 hours.

[0254] In any of these STING agonist production embodiments, the genetically engineered bacteria are capable of reducing viral infection, e.g., viral infected cell growth and/or proliferation (in vitro during cell culture and/or in vivo) by at least about 0 to 10%, 10% to 20%, 20% to 25%, 25% to 30%, 30% to 40%, 40% to 50%, 50% to 60%, 60% to 70%, 70% to 75%, 75% to 80%, 80% to 85%, 85% to 90%, 90% to 95%, 95% to 99%, or more as compared to an unmodified bacteria of the same subtype under the same conditions.

[0255] In some embodiments, the genetically engineered bacteria comprising gene sequences encoding dacA (and/or another enzyme for the production of a STING agonists, e.g., cGAS) are able to increase IFN-01 mRNA or protein levels in macrophages and/or dendritic cells, e.g., in cell culture. In some embodiments, the IFN-β1 mRNA or protein increase dependent on the dose of bacteria administered. In some embodiments, the genetically engineered bacteria comprising gene sequences encoding dacA (and/or another enzyme for the production of a STING agonists, e.g., cGAS) are able to increase IFN-01 mRNA or protein levels in macrophages and/or dendritic cells. In some embodiments, the IFN-beta1 mRNA or protein increase is dependent on the dosage of bacteria administered.

[0256] In one embodiment, IFN-beta1 mRNA or protein production in target cells is about two-fold, about 3-fold, about 4-fold as compared to levels of IFN-beta1 production observed upon administration of an unmodified bacteria of the same subtype under the same conditions, e.g., at day 2 after first injection of the bacteria. In some embodiments, the genetically engineered bacteria induce the production of at least about 6,000 to 25,000, 15,000 to 25,000, 6,000 to 8,000, 20,000 to 25,000 pg/ml IFN b1 mRNA in bone marrow-derived dendritic cells, e.g., at 4 hours post-stimulation.

[0257] In some embodiments, the genetically engineered bacteria comprising gene sequences encoding dacA (or another enzyme for the production of a STING agonists) can dose-dependently increase IFN-b1 production in bone marrow-derived dendritic cells, e.g., at 2 or 4 hours post stimulation.

[0258] In some embodiments, the genetically engineered bacteria comprising gene sequences encoding dacA (or another enzyme for the production of a STING agonists) are able to reduce viral infection, e.g., at 4 or 9 days after a regimen of 3 bacterial treatments, relative to an unmodified bacteria of the same subtype under the same conditions.

[0259] Strain activity of the STING agonist producing strain can be defined by conducting in vitro measurements c-di-AMP production (in the cell or in the medium). C-di-AMP production can be measured over a time period of 1, 2, 3, 4, 5, 6 hours or greater. In one example, c-di-AMP levels can be measured at 0, 2, or 4 hours. Unmodified Nissle can be used as a baseline in such measurements. If STING agonist producing enzyme is under the control of a promoter which is induced by a chemical inducer, the inducer needs to be added. If STING agonist producing enzyme is under the control of a promoter which is induced by exogenous environmental conditions, such as low-oxygen conditions, the bacterial cells are induced under these conditions, e.g., low oxygen conditions. As an additional baseline measurement, STING agonist producing strains which are inducible can be left uninduced. After the incubation time, levels of c-diAMP can be measured by LC-MS as described herein. In some embodiments, the induced STING agonist producing strain is capable of producing c-di-AMP at a concentration of at least about 0.01 mM to 1.4 mM per 10\hat{ }9. In some embodiments, the induced STING agonist producing strain is capable of producing c-di-AMP at a concentration of at least about 0.01 mM to 0.02 mM, 0.02 mM to 0.03 mM, 0.03 mM to 0.04 mM, 0.04 mM to 0.05 mM, 0.05 mM to 0.06 mM, 0.06 mM to 0.07 mM, 0.07 mM to 0.08 mM, 0.08 mM to 0.09 mM, 0.09 mM to 0.10 mM, 0.10 mM to 0.12 mM per 10\hat{ }9 e.g., after 2 or 4 hours. In some embodiments, the induced STING agonist producing strain is capable of producing c-di-AMP at a concentration of at least about 0.1 mM to 0.2 mM, 0.2 mM to 0.3 mM, 0.3 mM to 0.4 mM, 0.4 mM to 0.5 mM, 0.5 mM to 0.6 mM, 0.6 mM to 0.7 mM, 0.7 mM to 0.8 mM, 0.8 mM to 0.9 mM, 0.9 mM to 1 mM, 1 mM to 1.2 mM, 1.2 mM to 1.3 mM, 1.3 mM to 1.4 mM per 10\hat{ }9 e.g., after 2 or 4 hours.

[0260] Strain activity of the STING agonist producing strain may also be measured using in vitro measurements of activity. In a non-limiting example of an in vitro strain activity measurement, IFN-beta1 induction in RAW 264.7 cells (or other macrophage or dendritic cell) in culture may be measured. Activity of the strain can be measured at various multiplicities of infection (MOI) at various time points. For example, activity can be measured at 1, 2, 3, 4, 5, 6 hours or greater. In one example activity can be measured at 45 minutes or 4 hours. Unmodified Nissle can be used as a baseline in such measurements. If STING agonist producing enzyme is under the control of a promoter which is induced by a chemical inducer, the inducer needs to be added. If STING agonist producing enzyme is under the control of a promoter which is induced by exogenous environmental conditions, such as low-oxygen conditions, the bacterial cells are induced under these conditions, e.g., low oxygen conditions. As an additional baseline measurement, STING agonist producing strains which are inducible can be left uninduced. After the incubation time, IFN-beta levels can be measured from protein extracts or RNA levels can be analyzed, e.g., via PCT based methods. In some embodiments, the induced STING agonist producing strain can elicit a dose-dependent induction of IFN-b levels. In some embodiments, 10\hat{ }1 to 10\hat{ }2 (multiplicities of infection (MOI) can induce at least about 20 to 25 times, 25 to 30 times, 30 to 35 times, 35 to 40 times or more greater IFN-beta levels as the unmodified Nissle baseline strain of the same subtype under the same conditions, e.g., after 4 hours. In some embodiments, 10\hat{ }1 to 10\hat{ }2 (multiplicities of infection (MOI) can induce at least about 10,000 to 12,000, 12,000 to 15,000, 15,000 to 20,000 or 20,000 to 25,000 pg/ml media IFN-beta e.g., after 4 hours.

[0261] In some embodiments, 10\hat{ }1 to 10\hat{ }2 (multiplicities of infection (MOI) can induce at least about 10 to 12 times, 12 to 15 times, 15 to 20 times, 20 to 25 times or more greater IFN-beta levels as the wild type Nissle baseline strain of the same subtype under the same conditions, e.g., after 45 minutes. In some embodiments, 10\hat{ }1 to 10\hat{ }2 (multiplicities of infection (MOI) can induce at least about 4,000 to 6,000, 6,000 to 8,000, 8,000 to 10,000 or 10,000 to 12,000 pg/ml media IFN-beta e.g., after 45 minutes.

[0262] In some embodiments, the bacteria genetically engineered to produce STING agonists are capable of increasing the response rate by at least about 0 to 10%, 10% to 20%, 20% to 25%, 25% to 30%, 30% to 40%, 40% to 50%, 50% to 60%, 60% to 70%, 70% to 75%, 75% to 80%, 80% to 85%, 85% to 90%, 90% to 95%, 95% to 99%10% to 20%, 20% to 25%, 25% to 30%, 30% to 40%, 40% to 50%, 50% to 60%, 60% to 70%, 70% to 75%, 75% to 80%, 80% to 85%, 85% to 90%, 90% to 95%, 95% to 99%, 98% or more as compared to an unmodified bacteria of the same subtype under the same conditions. In some embodiments, the genetically engineered bacteria comprising gene sequences encoding dacA, achieve a 100% response rate.

[0263] In some embodiments, the response rate is at least about 0 to 1.0-fold, 1.0-1.2-fold, 1.2-1.4-fold, 1.4-1.6-fold, 1.6-1.8-fold, 1.8-2-fold, or two-fold than observed with than unmodified bacteria of the same bacterial subtype under the same conditions. In yet another embodiment, the response rate is about 2 to 3-fold, 3 to 4-fold, 4 to 5-fold, 5 to 6-fold, 6 to 7-fold, 7 to 8-fold, 8 to 9-fold, 9 to 10-fold, 10 to 15-fold, 15 to 20-fold, 20 to 30-fold, 30 to 40-fold, or 40 to 50-fold, 50 to 100-fold, 100 to 500-fold, or 500 to 1000-fold or more than observed with unmodified bacteria of the same bacterial subtype under the same conditions.

[0264] In some embodiments, the genetically engineered bacteria comprising gene sequences encoding diadenylate cyclases, e.g., DacA, di-GAMP synthases, and/or other STING agonist producing polypeptides increase total T cell numbers in the lymph nodes. In some embodiments, the increase in total T cell numbers in the lymph nodes is at least about 0 to 10%, 10% to 20%, 20% to 25%, 25% to 30%, 30% to 40%, 40% to 50%, 50% to 60%, 60% to 70%, 70% to 75%, 75% to 80%, 80% to 85%, 85% to 90%, 90% to 95%, 95% to 99%10% to 20%, 20% to 25%, 25% to 30%, 30% to 40%, 40% to 50%, 50% to 60%, 60% to 70%, 70% to 75%, 75% to 80%, 80% to 85%, 85% to 90%, 90% to 95%, 95% to 99%, 98% or more as compared to an unmodified bacteria of the same subtype under the same conditions. In some embodiments, the increase in total T cell numbers is at least about 0 to 1.0-fold, 1.0-1.2-fold, 1.2-1.4-fold, 1.4-1.6-fold, 1.6-1.8-fold, 1.8-2-fold, or two-fold than observed with than unmodified bacteria of the same bacterial subtype under the same conditions. In yet another embodiment, the increase in total T cell numbers is about 2 to 3-fold, 3 to 4-fold, 4 to 5-fold, 5 to 6-fold, 6 to 7-fold, 7 to 8-fold, 8 to 9-fold, 9 to 10-fold, 10 to 15-fold, 15 to 20-fold, 20 to 30-fold, 30 to 40-fold, or 40 to 50-fold, 50 to 100-fold, 100 to 500-fold, or 500 to 1000-fold more than observed with unmodified bacteria of the same bacterial subtype under the same conditions.

[0265] In some embodiments, the genetically engineered bacteria comprising gene sequences encoding diadenylate cyclases, e.g., DacA, di-GAMP synthases, and/or other STING agonist producing polypeptides increase the percentage of activated effector CD4 and CD8 T cells in lymph nodes.

[0266] In some embodiments, the percentage of activated effector CD4 and CD8 T cells in the lymph nodes is at least about 0 to 10%, 10% to 20%, 20% to 25%, 25% to 30%, 30% to 40%, 40% to 50%, 50% to 60%, 60% to 70%, 70% to 75%, 75% to 80%, 80% to 85%, 85% to 90%, 90% to 95%, 95% to 99%10% to 20%, 20% to 25%, 25% to 30%, 30% to 40%, 40% to 50%, 50% to 60%, 60% to 70%, 70% to 75%, 75% to 80%, 80% to 85%, 85% to 90%, 90% to 95%, 95% to 99%, 98% or more as compared to an unmodified bacteria of the same subtype under the same conditions. In some embodiments, the percentage of activated effector CD4 and CD8 T cells is at least about 0 to 1.0-fold, 1.0-1.2-fold, 1.2-1.4-fold, 1.4-1.6-fold, 1.6-1.8-fold, 1.8-2-fold, or two-fold than observed with than unmodified bacteria of the same bacterial subtype under the same conditions. In yet another embodiment, the percentage of activated effector CD4 and CD8 T cells is about 2 to 3-fold, 3 to 4-fold, 4 to 5-fold, 5 to 6-fold, 6 to 7-fold, 7 to 8-fold, 8 to 9-fold, 9 to 10-fold, 10 to 15-fold, 15 to 20-fold, 20 to 30-fold, 30 to 40-fold, or 40 to 50-fold, 50 to 100-fold, 100 to 500-fold, or 500 to 1000-fold more than observed with unmodified bacteria of the same bacterial subtype under the same conditions. In one embodiment, the gene encoded by the bacteria is DacA and the percentage of activated effector CD4 and CD8 T cells is two to four fold more than observed with unmodified bacteria of the same bacterial subtype under the same conditions.

[0267] In some embodiments, the genetically engineered bacteria comprising gene sequences encoding diadenylate cyclases, e.g., DacA, di-GAMP synthases, and/or other STING agonist producing polypeptides achieve early rise of innate cytokines and a later rise of an effector-T-cell response.

[0268] In some embodiments, the genetically engineered bacteria comprising gene sequences encoding dacA (or other enzymes for production of STING agonists) in the target cells are able to overcome immunological suppression and generating robust innate and adaptive immune responses. In some embodiments, the genetically engineered bacteria comprising gene sequences encoding dacA inhibit proliferation or accumulation of regulatory T cells.

[0269] In some embodiments, the genetically engineered bacteria comprising gene sequences encoding dacA, cGAS, and/or other enzymes for production of STING agonists, achieve early rise of innate cytokines, including but not limited to IL-6, IL-1beta, and MCP-1.

[0270] In some embodiments IL-6 is at least about 0 to 10%, 10% to 20%, 20% to 25%, 25% to 30%, 30% to 40%, 40% to 50%, 50% to 60%, 60% to 70%, 70% to 75%, 75% to 80%, 80% to 85%, 85% to 90%, 90% to 95%, 95% to 99%10% to 20%, 20% to 25%, 25% to 30%, 30% to 40%, 40% to 50%, 50% to 60%, 60% to 70%, 70% to 75%, 75% to 80%, 80% to 85%, 85% to 90%, 90% to 95%, 95% to 99%, 98% or more induced as compared to an unmodified bacteria of the same subtype under the same conditions. In some embodiments, IL-6 is at least about 0 to 1.0-fold, 1.0-1.2-fold, 1.2-1.4-fold, 1.4-1.6-fold, 1.6-1.8-fold, 1.8-2-fold, or two-fold more induced than observed with than unmodified bacteria of the same bacterial subtype under the same conditions. In yet another embodiment, the IL-6 is about 2 to 3-fold, 3 to 4-fold, 4 to 5-fold, 5 to 6-fold, 6 to 7-fold, 7 to 8-fold, 8 to 9-fold, 9 to 10-fold, 10 to 15-fold, 15 to 20-fold, 20 to 30-fold, 30 to 40-fold, or 40 to 50-fold, 50 to 100-fold, 100 to 500-fold, or 500 to 1000-fold or more induced than observed with unmodified bacteria of the same bacterial subtype under the same conditions. In one embodiment, the gene encoded by the bacteria is dacA and the levels of induced IL-6 is about two to three-fold greater than observed with unmodified bacteria of the same bacterial subtype under the same conditions.

[0271] In some embodiments, the levels of IL-1beta in the target cells is at least about 0 to 10%, 10% to 20%, 20% to 25%, 25% to 30%, 30% to 40%, 40% to 50%, 50% to 60%, 60% to 70%, 70% to 75%, 75% to 80%, 80% to 85%, 85% to 90%, 90% to 95%, 95% to 99%10% to 20%, 20% to 25%, 25% to 30%, 30% to 40%, 40% to 50%, 50% to 60%, 60% to 70%, 70% to 75%, 75% to 80%, 80% to 85%, 85% to 90%, 90% to 95%, 95% to 99%, 98% or more elevated as compared to an unmodified bacteria of the same subtype under the same conditions. In some embodiments, the levels of IL-1beta are at least about 0 to 1.0-fold, 1.0-1.2-fold, 1.2-1.4-fold, 1.4-1.6-fold, 1.6-1.8-fold, 1.8-2-fold, or two-fold or more elevated than observed with than unmodified bacteria of the same bacterial subtype under the same conditions. In yet another embodiment, levels of IL-1beta are about 2 to 3-fold, 3 to 4-fold, 4 to 5-fold, 5 to 6-fold, 6 to 7-fold, 7 to 8-fold, 8 to 9-fold, 9 to 10-fold, 10 to 15-fold, 15 to 20-fold, 20 to 30-fold, 30 to 40-fold, or 40 to 50-fold, 50 to 100-fold, 100 to 500-fold, or 500 to 1000-fold or more elevated than observed with unmodified bacteria of the same bacterial subtype under the same conditions. In one embodiment, the gene encoded by the bacteria is a diadenylate cyclase, e.g., DacA, a di-GAMP synthase, and/or other STING agonist producing polypeptide and levels of IL-1beta are about 2 fold, 3 fold, or 4 fold more than observed with unmodified bacteria of the same bacterial subtype under the same conditions.

[0272] In some embodiments, the levels of MCP1 in the target cells is at least about 0 to 10%, 10% to 20%, 20% to 25%, 25% to 30%, 30% to 40%, 40% to 50%, 50% to 60%, 60% to 70%, 70% to 75%, 75% to 80%, 80% to 85%, 85% to 90%, 90% to 95%, 95% to 99%10% to 20%, 20% to 25%, 25% to 30%, 30% to 40%, 40% to 50%, 50% to 60%, 60% to 70%, 70% to 75%, 75% to 80%, 80% to 85%, 85% to 90%, 90% to 95%, 95% to 99%, 98% or more elevated as compared to an unmodified bacteria of the same subtype under the same conditions. In some embodiments, the levels of MCP1 are at least about 0 to 1.0-fold, 1.0-1.2-fold, 1.2-1.4-fold, 1.4-1.6-fold, 1.6-1.8-fold, 1.8-2-fold, or two-fold or more elevated than observed with than unmodified bacteria of the same bacterial subtype under the same conditions. In yet another embodiment, levels of MCP1 are about 2 to 3-fold, 3 to 4-fold, 4 to 5-fold, 5 to 6-fold, 6 to 7-fold, 7 to 8-fold, 8 to 9-fold, 9 to 10-fold, 10 to 15-fold, 15 to 20-fold, 20 to 30-fold, 30 to 40-fold, or 40 to 50-fold, 50 to 100-fold, 100 to 500-fold, or 500 to 1000-fold or more elevated than observed with unmodified bacteria of the same bacterial subtype under the same conditions. In one embodiment, the gene encoded by the bacteria is a diadenylate cyclase, e.g., DacA, a di-GAMP synthase, and/or other STING agonist producing polypeptide and levels of MCP1 are about 2-fold, 3-fold, or 4-fold more than observed with unmodified bacteria of the same bacterial subtype under the same conditions.

[0273] In some embodiments, the genetically engineered bacteria comprising gene sequences encoding diadenylate cyclases, e.g., DacA, di-GAMP synthases, and/or other STING agonist producing polypeptides achieve activation of molecules relevant towards an effector-T-cell response, including but not limited to, Granzyme B, IL-2, and IL-15.

[0274] In some embodiments, the levels of granzyme B in the target cells is at least about 0 to 10%, 10% to 20%, 20% to 25%, 25% to 30%, 30% to 40%, 40% to 50%, 50% to 60%, 60% to 70%, 70% to 75%, 75% to 80%, 80% to 85%, 85% to 90%, 90% to 95%, 95% to 99%10% to 20%, 20% to 25%, 25% to 30%, 30% to 40%, 40% to 50%, 50% to 60%, 60% to 70%, 70% to 75%, 75% to 80%, 80% to 85%, 85% to 90%, 90% to 95%, 95% to 99%, 98% or more elevated as compared to an unmodified bacteria of the same subtype under the same conditions. In some embodiments, the levels of granzyme B are at least about 0 to 1.0-fold, 1.0-1.2-fold, 1.2-1.4-fold, 1.4-1.6-fold, 1.6-1.8-fold, 1.8-2-fold, or two-fold or more elevated than observed with than unmodified bacteria of the same bacterial subtype under the same conditions. In yet another embodiment, levels of granzyme B are about 2 to 3-fold, 3 to 4-fold, 4 to 5-fold, 5 to 6-fold, 6 to 7-fold, 7 to 8-fold, 8 to 9-fold, 9 to 10-fold, 10 to 15-fold, 15 to 20-fold, 20 to 30-fold, 30 to 40-fold, or 40 to 50-fold, 50 to 100-fold, 100 to 500-fold, or 500 to 1000-fold or more elevated than observed with unmodified bacteria of the same bacterial subtype under the same conditions. In one embodiment, the gene encoded by the bacteria is a diadenylate cyclase, e.g., DacA, a di-GAMP synthase, and/or other STING agonist producing polypeptide and levels of granzyme B are about 2 fold, 3 fold, or 4 fold more than observed with unmodified bacteria of the same bacterial subtype under the same conditions.

[0275] In some embodiments, the levels of IL-2 in the target cells is at least about 0 to 10%, 10% to 20%, 20% to 25%, 25% to 30%, 30% to 40%, 40% to 50%, 50% to 60%, 60% to 70%, 70% to 75%, 75% to 80%, 80% to 85%, 85% to 90%, 90% to 95%, 95% to 99%10% to 20%, 20% to 25%, 25% to 30%, 30% to 40%, 40% to 50%, 50% to 60%, 60% to 70%, 70% to 75%, 75% to 80%, 80% to 85%, 85% to 90%, 90% to 95%, 95% to 99%, 98% or more elevated as compared to an unmodified bacteria of the same subtype under the same conditions. In some embodiments, the levels of IL-2 are at least about 0 to 1.0-fold, 1.0-1.2-fold, 1.2-1.4-fold, 1.4-1.6-fold, 1.6-1.8-fold, 1.8-2-fold, or two-fold or more elevated than observed with than unmodified bacteria of the same bacterial subtype under the same conditions. In yet another embodiment, levels of IL-2 are about 2 to 3-fold, 3 to 4-fold, 4 to 5-fold, 5 to 6-fold, 6 to 7-fold, 7 to 8-fold, 8 to 9-fold, 9 to 10-fold, 10 to 15-fold, 15 to 20-fold, 20 to 30-fold, 30 to 40-fold, or 40 to 50-fold, 50 to 100-fold, 100 to 500-fold, or 500 to 1000-fold or more elevated than observed with unmodified bacteria of the same bacterial subtype under the same conditions. In one embodiment, the gene encoded by the bacteria is DacA and the levels of IL-2 are about 3 fold, 4 fold, or 5 fold more than observed with unmodified bacteria of the same bacterial subtype under the same conditions.

[0276] In some embodiments, the levels of IL-15 in the target cells is at least about 0 to 10%, 10% to 20%, 20% to 25%, 25% to 30%, 30% to 40%, 40% to 50%, 50% to 60%, 60% to 70%, 70% to 75%, 75% to 80%, 80% to 85%, 85% to 90%, 90% to 95%, 95% to 99%10% to 20%, 20% to 25%, 25% to 30%, 30% to 40%, 40% to 50%, 50% to 60%, 60% to 70%, 70% to 75%, 75% to 80%, 80% to 85%, 85% to 90%, 90% to 95%, 95% to 99%, 98% or more elevated as compared to an unmodified bacteria of the same subtype under the same conditions. In some embodiments, the levels of IL-15 are at least about 0 to 1.0-fold, 1.0-1.2-fold, 1.2-1.4-fold, 1.4-1.6-fold, 1.6-1.8-fold, 1.8-2-fold, or two-fold or more elevated than observed with than unmodified bacteria of the same bacterial subtype under the same conditions. In yet another embodiment, levels of IL-15 are at least about 2 to 3-fold, 3 to 4-fold, 4 to 5-fold, 5 to 6-fold, 6 to 7-fold, 7 to 8-fold, 8 to 9-fold, 9 to 10-fold, 10 to 15-fold, 15 to 20-fold, 20 to 30-fold, 30 to 40-fold, or 40 to 50-fold, 50 to 100-fold, 100 to 500-fold, or 500 to 1000-fold or more elevated than observed with unmodified bacteria of the same bacterial subtype under the same conditions. In one embodiment, gene encoded by the bacteria is DacA and the levels of IL-15 are about 2-fold, 3-fold, -fold, or 5-fold more than observed with unmodified bacteria of the same bacterial subtype under the same conditions.

[0277] In some embodiments, the levels of IFNg in the target cells is at least about 0 to 10%, 10% to 20%, 20% to 25%, 25% to 30%, 30% to 40%, 40% to 50%, 50% to 60%, 60% to 70%, 70% to 75%, 75% to 80%, 80% to 85%, 85% to 90%, 90% to 95%, 95% to 99%10% to 20%, 20% to 25%, 25% to 30%, 30% to 40%, 40% to 50%, 50% to 60%, 60% to 70%, 70% to 75%, 75% to 80%, 80% to 85%, 85% to 90%, 90% to 95%, 95% to 99%, 98% or more elevated as compared to an unmodified bacteria of the same subtype under the same conditions. In some embodiments, the levels of IFNg are at least about 0 to 1.0-fold, 1.0-1.2-fold, 1.2-1.4-fold, 1.4-1.6-fold, 1.6-1.8-fold, 1.8-2-fold, or two-fold or more elevated than observed with than unmodified bacteria of the same bacterial subtype under the same conditions. In yet another embodiment, levels of IFNg are at least about 2 to 3-fold, 3 to 4-fold, 4 to 5-fold, 5 to 6-fold, 6 to 7-fold, 7 to 8-fold, 8 to 9-fold, 9 to 10-fold, 10 to 15-fold, 15 to 20-fold, 20 to 30-fold, 30 to 40-fold, or 40 to 50-fold, 50 to 100-fold, 100 to 500-fold, or 500 to 1000-fold or more elevated than observed with unmodified bacteria of the same bacterial subtype under the same conditions. In one embodiment, the gene encoded by the bacteria is a diadenylate cyclase, e.g., DacA, di-GAMP synthase, and/or other STING agonist producing polypeptide and levels of IFNg are about 2 fold, 3 fold, or 4 fold more than observed with unmodified bacteria of the same bacterial subtype under the same conditions.

[0278] In some embodiments, the levels of IL-12 in the target cells is at least about 0 to 10%, 10% to 20%, 20% to 25%, 25% to 30%, 30% to 40%, 40% to 50%, 50% to 60%, 60% to 70%, 70% to 75%, 75% to 80%, 80% to 85%, 85% to 90%, 90% to 95%, 95% to 99%10% to 20%, 20% to 25%, 25% to 30%, 30% to 40%, 40% to 50%, 50% to 60%, 60% to 70%, 70% to 75%, 75% to 80%, 80% to 85%, 85% to 90%, 90% to 95%, 95% to 99%, 98% or more elevated as compared to an unmodified bacteria of the same subtype under the same conditions. In some embodiments, the levels of IL-12 are at least about 0 to 1.0-fold, 1.0-1.2-fold, 1.2-1.4-fold, 1.4-1.6-fold, 1.6-1.8-fold, 1.8-2-fold, or two-fold or more elevated than observed with than unmodified bacteria of the same bacterial subtype under the same conditions. In yet another embodiment, levels of IL-12 are at least about 2 to 3-fold, 3 to 4-fold, 4 to 5-fold, 5 to 6-fold, 6 to 7-fold, 7 to 8-fold, 8 to 9-fold, 9 to 10-fold, 10 to 15-fold, 15 to 20-fold, 20 to 30-fold, 30 to 40-fold, or 40 to 50-fold, 50 to 100-fold, 100 to 500-fold, or 500 to 1000-fold or more elevated than observed with unmodified bacteria of the same bacterial subtype under the same conditions. In one embodiment, the gene encoded by the bacteria is a diadenylate cyclase, e.g., DacA, a di-GAMP synthase, and/or other STING agonist producing polypeptide and levels of IL-12 are about 2 fold, 3 fold, or 4 fold more than observed with unmodified bacteria of the same bacterial subtype under the same conditions.

[0279] In some embodiments, the levels of TNF-α in the target cells is at least about 0% to 10%, 10% to 20%, 20% to 25%, 25% to 30%, 30% to 40%, 40% to 50%, 50% to 60%, 60% to 70%, 70% to 75%, 75% to 80%, 80% to 85%, 85% to 90%, 90% to 95%, 95% to 99%10% to 20%, 20% to 25%, 25% to 30%, 30% to 40%, 40% to 50%, 50% to 60%, 60% to 70%, 70% to 75%, 75% to 80%, 80% to 85%, 85% to 90%, 90% to 95%, 95% to 99%, 98% or more elevated as compared to an unmodified bacteria of the same subtype under the same conditions. In some embodiments, the levels of TNF-α are at least about 0 to 1.0-fold, 1.0-1.2-fold, 1.2-1.4-fold, 1.4-1.6-fold, 1.6-1.8-fold, 1.8-2-fold, or two-fold or more elevated than observed with than unmodified bacteria of the same bacterial subtype under the same conditions. In yet another embodiment, levels of TNF-α are at least about 2 to 3-fold, 3 to 4-fold, 4 to 5-fold, 5 to 6-fold, 6 to 7-fold, 7 to 8-fold, 8 to 9-fold, 9 to 10-fold, 10 to 15-fold, 15 to 20-fold, 20 to 30-fold, 30 to 40-fold, or 40 to 50-fold, 50 to 100-fold, 100 to 500-fold, or 500 to 1000-fold or more elevated than observed with unmodified bacteria of the same bacterial subtype under the same conditions. In one embodiment, the gene encoded by the bacteria is a diadenylate cyclase, e.g., DacA, a di-GAMP synthase, and/or other STING agonist producing polypeptide and levels of TNF-α are at least about 2 fold, 3 fold, or 4 fold more than observed with unmodified bacteria of the same bacterial subtype under the same conditions.

[0280] In some embodiments, the levels of GM-CSF in the target cells is at least about 0 to 10%, 10% to 20%, 20% to 25%, 25% to 30%, 30% to 40%, 40% to 50%, 50% to 60%, 60% to 70%, 70% to 75%, 75% to 80%, 80% to 85%, 85% to 90%, 90% to 95%, 95% to 99%10% to 20%, 20% to 25%, 25% to 30%, 30% to 40%, 40% to 50%, 50% to 60%, 60% to 70%, 70% to 75%, 75% to 80%, 80% to 85%, 85% to 90%, 90% to 95%, 95% to 99%, 98% or more elevated as compared to an unmodified bacteria of the same subtype under the same conditions. In some embodiments, the levels of GM-CSF are at least about 0 to 1.0-fold, 1.0-1.2-fold, 1.2-1.4-fold, 1.4-1.6-fold, 1.6-1.8-fold, 1.8-2-fold, or two-fold or more elevated than observed with than unmodified bacteria of the same bacterial subtype under the same conditions. In yet another embodiment, levels of GM-CSF are about 2 to 3-fold, 3 to 4-fold, 4 to 5-fold, 5 to 6-fold, 6 to 7-fold, 7 to 8-fold, 8 to 9-fold, 9 to 10-fold, 10 to 15-fold, 15 to 20-fold, 20 to 30-fold, 30 to 40-fold, or 40 to 50-fold, 50 to 100-fold, 100 to 500-fold, or 500 to 1000-fold or more elevated than observed with unmodified bacteria of the same bacterial subtype under the same conditions. In one embodiment, the gene encoded by the bacteria is a diadenylate cyclase, e.g., DacA, a di-GAMP synthase, and/or other STING agonist producing polypeptide and levels of GM-CSF are at least about 2 fold, 3 fold, or 4 fold more than observed with unmodified bacteria of the same bacterial subtype under the same conditions.

[0281] In some embodiments, administration of the genetically engineered bacteria comprising gene sequences encoding one or more of a diadenylate cyclase, e.g., DacA, a di-GAMP synthase, and/or other STING agonist producing polypeptide results in long-term immunological memory. In some embodiments, long term immunological memory is established, exemplified by at least about 0 to 10%, 10% to 20%, 20% to 25%, 25% to 30%, 30% to 40%, 40% to 50%, 50% to 60%, 60% to 70%, 70% to 75%, 75% to 80%, 80% to 85%, 85% to 90%, 90% to 95%, 95% to 99%10% to 20%, 20% to 25%, 25% to 30%, 30% to 40%, 40% to 50%, 50% to 60%, 60% to 70%, 70% to 75%, 75% to 80%, 80% to 85%, 85% to 90%, 90% to 95%, 95% to 99%, 98% or more protection from secondary viral infection challenge compared to naïve age-matched controls.

[0282] In some embodiments, the c-di-GAMP synthases, diadenylate cyclases, or other STING agonist producing polypeptides are modified and/or mutated, e.g., to enhance stability, or to increase STING agonism. In some embodiments, c-di-GAMP synthases from Vibrio cholerae or the orthologues thereof (e.g., from Verminephrobacter eiseniae, Kingella denitrificans, and/or Neisseria bacilliformis) or human cGAS is modified and/or mutated, e.g., to enhance stability, or to increase STING agonism. In some embodiments, the diadenylate cyclase from Listeria monocytogenes is modified and/or mutated, e.g., to enhance stability, or to increase STING agonism.

[0283] In some embodiments, the genetically engineered bacteria and/or other microorganisms are capable of producing one or more diadenylate cyclases, c-di-GAMP synthases and/or other STING agonist producing polypeptides under inducing conditions, e.g., under a condition(s) associated with immune suppression. In some embodiments, the genetically engineered bacteria and/or other microorganisms are capable of producing the diadenylate cyclases, c-di-GAMP synthases and/or other STING agonist producing polypeptides in low-oxygen conditions or hypoxic conditions, in the presence of certain molecules or metabolites, in the presence of molecules or metabolites associated with viral infection, or certain tissues, immune suppression, or inflammation, or in the presence of a metabolite that may or may not be present in the gut, circulation, or the target site, and which may be present in vitro during strain culture, expansion, production and/or manufacture such as arabinose, cumate, and salicylate. In some embodiments, the one or more genetically engineered bacteria comprise gene sequence(s) encoding the diadenylate cyclases, c-di-GAMP synthases and/or other STING agonist producing polypeptides, wherein the diadenylate cyclases, c-di-GAMP synthases and/or other STING agonist producing polypeptides are operably linked to a promoter inducible by exogenous environmental conditions of the target cells. In some embodiments, the one or more genetically engineered bacteria comprise gene sequence(s) encoding the diadenylate cyclases, c-di-GAMP synthases and/or other STING agonist producing polypeptides, wherein the diadenylate cyclases, c-di-GAMP synthases and/or other STING agonist producing polypeptides is operably linked to a promoter inducible by cumate or salicylate as described herein. In some embodiments, the gene sequences encoding diadenylate cyclases, c-di-GAMP synthases and/or other STING agonist producing polypeptides are operably linked to a constitutive promoter. In some embodiments, the gene sequences encoding diadenylate cyclases, c-di-GAMP synthases and/or other STING agonist producing polypeptides are present on one or more plasmids (e.g., high copy or low copy) or are integrated into one or more sites in the bacteria and/or other microorganism chromosome(s).

[0284] In any of these embodiments, any of the STING agonist producing strains described herein may comprise an auxotrophic modification. In any of these embodiments, the STING agonist producing strains may comprise an auxotrophic modification in DapA, e.g., a deletion or mutation in DapA. In any of these embodiments, the STING agonist producing strains may further comprise an auxotrophic modification in ThyA e.g., a deletion or mutation in ThyA. In any of these embodiments, the STING agonist producing strains may comprise a DapA and a ThyA auxotrophy. In any of these embodiments, the bacteria may further comprise an endogenous phage modification, e.g., a mutation or deletion, in an endogenous phage. In a non-limiting example the bacterial host is E. coli Nissle and the phage modification comprises a modification in Nissle Phage 3, described herein. In one example, the phage modification is a deletion of one or more genes, e.g., a 10 kb deletion.

[0285] In any of these embodiments describing genetically engineered bacteria comprising gene sequences encoding one or more diadenylate cyclases, c-di-GAMP synthases or other STING agonist producing polypeptides, the genetically engineered bacteria may further comprise gene sequence(s) encoding kynureninase, e.g., kynureninase from Pseudomonas fluorescens and (optionally) having a modification, e.g., mutation or deletion in the TrpE gene. Alternatively the genetically engineered bacteria comprising gene sequences encoding one or more diadenylate cyclases, c-di-GAMP synthases or other STING agonist producing polypeptides may be combined or administered with genetically engineered bacteria comprising gene sequence(s) encoding kynureninase, e.g., kynureninase from Pseudomonas fluorescens and (optionally) having a modification, e.g., mutation or deletion in the TrpE gene.

[0286] In certain embodiments, one or more genetically engineered bacteria comprise gene sequence(s) encoding diadenylate cyclase e.g., DacA, e.g., from Listeria monocytogenes, wherein diadenylate cyclase gene is operably linked to a promoter inducible under exogenous environmental conditions. In one embodiment, the diadenylate cyclase gene is operably linked to a promoter inducible under low oxygen conditions, e.g., a FNR promoter. In certain embodiments, one or more genetically engineered bacteria comprise gene sequence(s) encoding diadenylate cyclase, e.g., dacA, e.g., from Listeria monocytogenes, wherein diadenylate cyclase is operably linked to a promoter inducible by cumate or salicylate as described herein. In certain embodiments, the diadenylate cyclase gene sequences are integrated into the bacterial chromosome. Suitable integration sites are described herein. In a non-limiting example the diadenylate cyclase gene is integrated at HA910. In certain embodiments, the bacteria comprising gene sequences encoding the diadenylate cyclase further comprise an auxotrophic modification. In some embodiments, the modification, e.g., a mutation or deletion is in the dapA gene. In some embodiments, the modification, e.g., a mutation or deletion is in the thyA gene. In some embodiments, the modification, e.g., a mutation or deletion is in both dapA and thyA genes. In any of these embodiments, the bacteria may further comprise a phage modification, e.g., a mutation or deletion in an endogenous prophage. In one example, the prophage modification is a deletion of one or more genes, e.g., a 10 kb deletion. In a non-limiting example, the genetically engineered bacteria comprising gene sequences encoding diadenylate cyclase are derived from E. coli Nissle and the prophage modification comprises a deletion or mutation in Nissle Prophage 3, described herein.

[0287] In certain embodiments genetically engineered bacteria comprising gene sequences encoding one or more diadenylate cyclases, the genetically engineered bacteria may further comprise gene sequence(s) encoding kynureninase, e.g., kynureninase from Pseudomonas fluorescens and (optionally) having a modification, e.g., mutation or deletion in the TrpE gene. Alternatively the genetically engineered bacteria comprising gene sequences encoding one or more diadenylate cyclases may be combined or administered with genetically engineered bacteria comprising gene sequence(s) encoding kynureninase, e.g., kynureninase from Pseudomonas fluorescens and (optionally) having a modification, e.g., mutation or deletion in the TrpE gene.

[0288] In one specific embodiment, one or more genetically engineered bacteria comprise gene sequence(s) encoding diadenylate cyclase e.g., DacA, e.g., from Listeria monocytogenes, wherein the diadenylate cyclase gene is operably linked to a promoter inducible under low oxygen conditions, e.g., a FNR promoter. The dacA gene sequences are integrated into the bacterial chromosome, e.g., at integration site HA910. The bacteria further comprise a auxotrophic modification, e.g., a mutation or deletion in dapA or thyA or both genes. The bacteria may further comprise an endogenous phage modification, e.g., a mutation or deletion, in an endogenous phage, e.g., a 10 kb deletion. In one specific embodiment, the genetically engineered bacteria are derived from E. coli Nissle and the phage modification comprises a deletion or mutation in Nissle Phage 3, e.g., as described herein.

[0289] In another specific embodiment, the genetically engineered bacteria may further comprise gene sequence(s) encoding kynureninase, e.g., kynureninase from Pseudomonas fluorescens and (optionally) having a modification, e.g., mutation or deletion in the TrpE gene. Alternatively the genetically engineered bacteria may be combined or administered with genetically engineered bacteria comprising gene sequence(s) encoding kynureninase, e.g., kynureninase from Pseudomonas fluorescens and (optionally) having a modification, e.g., mutation or deletion in the TrpE gene.

[0290] In certain embodiments, one or more genetically engineered bacteria comprise gene sequence(s) encoding cGAMP synthase e.g., human cGAS, wherein the cGAS gene is operably linked to a promoter inducible under exogenous environmental conditions. In one embodiment, the cGAS gene is operably linked to a promoter inducible under low oxygen conditions, e.g., a FNR promoter. In certain embodiments, one or more genetically engineered bacteria comprise gene sequence(s) encoding cGAS, e.g., human cGAS, wherein the cGAS gene is operably linked to a promoter inducible by cumate or salicylate as described herein. In certain embodiments, the cGAS gene sequences are integrated into the bacterial chromosome. Suitable integration sites are described herein and known in the art. In certain embodiments, the bacteria comprising gene sequences encoding cGAS further comprise an auxotrophic modification, e.g., a mutation or deletion in dapA or thyA or both genes. In some embodiments, the modification, e.g., a mutation or deletion is in the dapA gene. In some embodiments, the modification, e.g., a mutation or deletion is in thyA gene. In some embodiments, the modification, e.g., a mutation or deletion is in both dapA and thyA genes. In any of these embodiments, the bacteria may further comprise a prophage modification, e.g., a mutation or deletion, in an endogenous prophage. In one example, the prophage modification is a deletion of one or more genes, e.g., a 10 kb deletion. In a non-limiting example, the genetically engineered bacteria comprising gene sequences encoding cGAS are derived from E. coli Nissle and the prophage modification comprises a deletion or mutation in Nissle Phage 3, described herein.

[0291] In any of these embodiments describing genetically engineered bacteria comprising gene sequences encoding one or more cGAS, the genetically engineered bacteria may further comprise gene sequence(s) encoding kynureninase, e.g., kynureninase from Pseudomonas fluorescens and (optionally) having a modification, e.g., mutation or deletion in the TrpE gene. Alternatively the genetically engineered bacteria comprising gene sequences encoding one or more cGAS may be combined or administered with genetically engineered bacteria comprising gene sequence(s) encoding kynureninase, e.g., kynureninase from Pseudomonas fluorescens and (optionally) having a modification, e.g., mutation or deletion in the TrpE gene.

[0292] In one embodiment, one or more genetically engineered bacteria comprise gene sequence(s) encoding cGAS e.g., human cGAS, wherein the cGAS gene is operably linked to a promoter inducible under low oxygen conditions, e.g., an FNR promoter. The cGAS gene sequences are integrated into the bacterial chromosome. The bacteria further comprise an auxotrophic modification, e.g., a mutation or deletion in dapA or thyA or both genes. The bacteria may further comprise an endogenous phage modification, e.g., a mutation or deletion, in an endogenous phage, e.g., a 10 kb deletion. In one specific embodiment, the genetically engineered bacteria are derived from E. coli Nissle and the phage modification comprises a deletion or mutation in Nissle Phage 3, e.g., as described herein.

[0293] In another specific embodiment, the genetically engineered bacteria comprising gene sequences encoding one or more cGAS, the genetically engineered bacteria may further comprise gene sequence(s) encoding kynureninase, e.g., kynureninase from Pseudomonas fluorescens and (optionally) having a modification, e.g., mutation or deletion in the TrpE gene. Alternatively the genetically engineered bacteria comprising gene sequences encoding one or more cGAS may be combined or administered with genetically engineered bacteria comprising gene sequence(s) encoding kynureninase, e.g., kynureninase from Pseudomonas fluorescens and (optionally) having a modification, e.g., mutation or deletion in the TrpE gene.

[0294] In certain embodiments, one or more genetically engineered bacteria comprise gene sequence(s) encoding diadenylate cyclase e.g., DacA, e.g., from Listeria monocytogenes, and cGAMP synthase e.g., human cGAS. In certain embodiments, the diadenylate cyclase gene and/or the cGAS gene are operably linked to a promoter inducible under exogenous environmental conditions. In certain embodiments, the diadenylate cyclase gene and/or cGAS gene are operably linked to a promoter inducible by cumate or salicylate, or another chemical inducer. In certain embodiments, the diadenylate cyclase gene and/or cGAS gene are operably linked to a constitutive promoter. In one embodiment, the diadenylate cyclase gene and/or cGAS gene is operably linked to a promoter inducible under low oxygen conditions, e.g., an FNR promoter. In certain embodiments, one or more genetically engineered bacteria comprise gene sequence(s) encoding diadenylate cyclase gene, e.g., dacA, e.g., from Listeria monocytogenes, and cGAS, e.g., human cGAS, wherein the diadenylate cyclase gene and/or cGAS gene is operably linked to a promoter inducible by cumate or salicylate as described herein. In certain embodiments, the diadenylate cyclase and cGAS gene sequences are integrated into the bacterial chromosome. Suitable integration sites are described herein and known in the art. In certain embodiments, the bacteria comprising gene sequences encoding diadenylate cyclase and cGAS further comprise a mutation or deletion in dapA or thyA or both genes. In any of these embodiments, the bacteria may further comprise a prophage modification, e.g., a mutation or deletion, in an endogenous prophage. In one example, the prophage modification is a deletion of one or more genes, e.g., a 10 kb deletion. In a non-limiting example, the genetically engineered bacteria comprising gene sequences encoding diadenylate cyclase and cGAS are derived from E. coli Nissle and the prophage modification comprises a deletion or mutation in Nissle Phage 3, described herein.

[0295] In any of these embodiments describing genetically engineered bacteria comprising gene sequences encoding one or more diadenylate cyclases and cGAS producing polypeptides, the genetically engineered bacteria may further comprise gene sequence(s) encoding kynureninase, e.g., kynureninase from Pseudomonas fluorescens and (optionally) having a modification, e.g., mutation or deletion in the TrpE gene. Alternatively the genetically engineered bacteria comprising gene sequences encoding one or more diadenylate cyclases and cGAS polypeptides may be combined or administered with genetically engineered bacteria comprising gene sequence(s) encoding kynureninase, e.g., kynureninase from Pseudomonas fluorescens and (optionally) having a modification, e.g., mutation or deletion in the TrpE gene.

[0296] In one specific embodiment, one or more genetically engineered bacteria comprise gene sequence(s) encoding diadenylate cyclase e.g., DacA, e.g., from Listeria monocytogenes, and cGAS e.g., human cGAS, wherein the diadenylate cyclase gene and/or cGAS gene is operably linked to a promoter inducible under low oxygen conditions, e.g., an FNR promoter. The diadenylate cyclase gene and cGAS gene sequences are integrated into the bacterial chromosome. The bacteria further comprise an auxotrophic modification, e.g., a mutation or deletion in dapA or thyA or both genes. The bacteria may further comprise an endogenous phage modification, e.g., a mutation or deletion, in an endogenous phage, e.g., a 10 kb deletion. In one specific embodiment, the genetically engineered bacteria are derived from E. coli Nissle and the phage modification comprises a deletion or mutation in Nissle Phage 3, e.g., as described herein.

[0297] In another specific embodiment, the genetically engineered bacteria comprising gene sequences encoding one or more diadenylate cyclases and cGAS polypeptides, the genetically engineered bacteria may further comprise gene sequence(s) encoding kynureninase, e.g., kynureninase from Pseudomonas fluorescens and (optionally) having a modification, e.g., mutation or deletion in the TrpE gene. Alternatively, the genetically engineered bacteria comprising gene sequences encoding one or more diadenylate cyclases and cGAS polypeptides may be combined or administered with genetically engineered bacteria comprising gene sequence(s) encoding kynureninase, e.g., kynureninase from Pseudomonas fluorescens and (optionally) having a modification, e.g., mutation or deletion in the TrpE gene.

[0298] In any of these embodiments, the one or more bacteria genetically engineered to produce one or more STING agonists may be administered alone or in combination with one or more immune checkpoint inhibitors described herein, including but not limited to anti-CTLA4, anti-PD1, or anti-PD-L1 antibodies. In some embodiments, the one or more genetically engineered bacteria which produce STING agonists evoke immunological memory when administered in combination with checkpoint inhibitor therapy.

[0299] In any of these embodiments, the one or more bacteria genetically engineered to produce STING agonists may be genetically engineered to produce and secrete or display on their surface one or more immune checkpoint inhibitors described herein, including but not limited to anti-CTLA4, anti-PD1, or anti-PD-L1 antibodies. In some embodiments, the one or more genetically engineered bacteria which comprise gene sequences encoding one or more enzymes for STING agonist production and gene sequences encoding one or more immune checkpoint inhibitor antibodies, e.g., scFv antibodies, promote immunological memory upon rechallenge/reoccurrence of a viral infection.

[0300] In any of these embodiments, the one or more bacteria genetically engineered to produce one or more STING agonists may be administered alone or in combination with one or more immune stimulatory agonists described herein, e.g., agonistic antibodies, including but not limited to anti-OX40, anti-41BB, or anti-GITR antibodies. In some embodiments, the one or more genetically engineered bacteria which produce STING agonists evoke immunological memory when administered in combination with anti-OX40, anti-41BB, or anti-GITR antibodies.

[0301] In any of these embodiments, the one or more bacteria genetically engineered to produce STING agonists may be genetically engineered to produce and secrete or display on their surface one or more immune stimulatory agonists described herein, e.g., agonistic antibodies, including but not limited to anti-OX40, anti-41BB, or anti-GITR antibodies. In some embodiments, the one or more genetically engineered bacteria comprising gene sequences encoding one or more STING agonist producing enzymes and gene sequences encoding one or more costimulatory antibodies, e.g., selected from anti-OX40, anti-41BB, or anti-GITR antibodies evoke immunological memory.

[0302] Also, in some embodiments, the genetically engineered bacteria and/or other microorganisms are further capable of expressing any one or more of the described circuits and further comprise one or more of the following: (1) one or more auxotrophies, such as any auxotrophies known in the art and provided herein, e.g., dapA and thyA auxotrophy, (2) one or more kill switch circuits, such as any of the kill-switches described herein or otherwise known in the art, (3) one or more antibiotic resistance circuits, (4) one or more transporters for importing biological molecules or substrates, such any of the transporters described herein or otherwise known in the art, (5) one or more secretion circuits, such as any of the secretion circuits described herein and otherwise known in the art, (6) one or more surface display circuits, such as any of the surface display circuits described herein and otherwise known in the art (7) one or more circuits for the production or degradation of one or more metabolites (e.g., kynurenine, tryptophan, adenosine, arginine) described herein, (8) one or more immune initiators (e.g. STING agonist, CD40L, SIRPα) described herein, (9) one or more immune sustainers (e.g. IL-15, IL-12, CXCL10) described herein, and (10) combinations of one or more of such additional circuits.

### Regulating Expression

[0303] In some embodiments, the bacterial cell comprises a stably maintained plasmid or chromosome carrying the gene(s) encoding payload (s), such that the payload(s) can be expressed in the host cell, and the host cell is capable of survival and/or growth in vitro, e.g., in medium, and/or in vivo. In some embodiments, bacterial cell comprises two or more distinct payloads or operons, e.g., two or more payload genes. In some embodiments, bacterial cell comprises three or more distinct transporters or operons, e.g., three or more payload genes. In some embodiments, bacterial cell comprises 4, 5, 6, 7, 8, 9, 10, or more distinct payloads or operons, e.g., 4, 5, 6, 7, 8, 9, 10, or more payload genes.

[0304] Herein the terms “payload” “polypeptide of interest” or “polypeptides of interest”, “protein of interest”, “proteins of interest”, “payloads” “effector molecule”, “effector” refers to one or more effector molecules described herein and/or one or more enzyme(s) or polypeptide(s) function as enzymes needed for the production of such effector molecules. Non-limiting examples of payloads include a viral COVID19 antigen, a STING agonist, etc.

[0305] As used herein, the term “polypeptide of interest” or “polypeptides of interest”, “protein of interest”, “proteins of interest”, “payload”, “payloads” further includes any or a plurality of any of the viral antigens, STING agonists, tryptophan synthesis enzymes, kynurenine degrading enzymes, adenosine degrading enzymes, arginine producing enzymes, and other metabolic pathway enzymes described herein. As used herein, the term “gene of interest” or “gene sequence of interest” includes any or a plurality of any of the gene(s) an/or gene sequence(s) and or gene cassette(s) encoding one or more immune modulator(s) described herein.

[0306] In some embodiments, the genetically engineered bacteria comprise multiple copies of the same payload gene(s). In some embodiments, the gene encoding the payload is present on a plasmid and operably linked to a directly or indirectly inducible promoter. In some embodiments, the gene encoding the payload is present on a plasmid and operably linked to a constitutive promoter. In some embodiments, the gene encoding the payload is present on a plasmid and operably linked to a promoter that is induced under low-oxygen or anaerobic conditions. In some embodiments, the gene encoding the payload is present on plasmid and operably linked to a promoter that is induced by exposure to tetracycline or arabinose, cumate, and salicylate, or another chemical or nutritional inducer described herein.

[0307] In some embodiments, the gene encoding the payload is present on a chromosome and operably linked to a directly or indirectly inducible promoter. In some embodiments, the gene encoding the payload is present on a chromosome and operably linked to a constitutive promoter. In some embodiments, the gene encoding the payload is present in the chromosome and operably linked to a promoter that is induced under low-oxygen or anaerobic conditions. In some embodiments, the gene encoding the payload is present on chromosome and operably linked to a promoter that is induced by exposure to tetracycline or arabinose, cumate, and salicylate, or another chemical or nutritional inducer described herein.

[0308] In some embodiments, the genetically engineered bacteria comprise two or more payloads, all of which are present on the chromosome. In some embodiments, the genetically engineered bacteria comprise two or more payloads, all of which are present on one or more same or different plasmids. In some embodiments, the genetically engineered bacteria comprise two or more payloads, some of which are present on the chromosome and some of which are present on one or more same or different plasmids.

[0309] In any of the embodiments described above, the one or more payload(s) for producing the effector or immune modulator combinations are operably linked to one or more directly or indirectly inducible promoter(s). In some embodiments, the one or more payload(s) are operably linked to a directly or indirectly inducible promoter that is induced under exogenous environmental conditions, e.g., conditions found in tissue specific conditions. In some embodiments, the one or more payload(s) are operably linked to a directly or indirectly inducible promoter that is induced by metabolites found in the tissue specific conditions. In some embodiments, the one or more payload(s) are operably linked to a directly or indirectly inducible promoter that is induced under low-oxygen or anaerobic conditions. In some embodiments, the one or more payload(s) are operably linked to a directly or indirectly inducible promoter that is induced under inflammatory conditions (e.g., RNS, ROS), as described herein. In some embodiments, the one or more payload(s) are operably linked to a directly or indirectly inducible promoter that is induced under immunosuppressive conditions, e.g., as found in the target site, as described herein. In some embodiments, the two or more gene sequence(s) are linked to a directly or indirectly inducible promoter that is induced by exposure a chemical or nutritional inducer, which may or may not be present under in vivo conditions and which may be present during in vitro conditions (such as strain culture, expansion, manufacture), such as tetracycline or arabinose, cumate, and salicylate, or others described herein. In some embodiments, the two or more payloads are all linked to a constitutive promoter.

[0310] In some embodiments, the promoter is induced under in vivo conditions, e.g., the gut, as described herein. In some embodiments, the promoters is induced under in vitro conditions, e.g., various cell culture and/or cell manufacturing conditions, as described herein. In some embodiments, the promoter is induced under in vivo conditions, e.g., the gut, as described herein, and under in vitro conditions, e.g., various cell culture and/or cell production and/or manufacturing conditions, as described herein.

[0311] In some embodiments, the promoter that is operably linked to the gene encoding the payload is directly induced by exogenous environmental conditions (e.g., in vivo and/or in vitro and/or production/manufacturing conditions). In some embodiments, the promoter that is operably linked to the gene encoding the payload is indirectly induced by exogenous environmental conditions (e.g., in vivo and/or in vitro and/or production/manufacturing conditions).

### FNR Dependent Regulation

[0312] The genetically engineered bacteria of the invention comprise a gene or gene cassette for producing an immune modulator, wherein the gene or gene cassette is operably linked to a directly or indirectly inducible promoter that is controlled by exogenous environmental condition(s). In some embodiments, the inducible promoter is an oxygen level-dependent promoter and an immune modulator is expressed in low-oxygen, microaerobic, or anaerobic conditions. For example, in low oxygen conditions, the oxygen level-dependent promoter is activated by a corresponding oxygen level-sensing transcription factor, thereby driving production of an immune modulator.

[0313] Bacteria have evolved transcription factors that are capable of sensing oxygen levels. Different signaling pathways may be triggered by different oxygen levels and occur with different kinetics. An oxygen level-dependent promoter is a nucleic acid sequence to which one or more oxygen level-sensing transcription factors is capable of binding, wherein the binding and/or activation of the corresponding transcription factor activates downstream gene expression. In one embodiment, the genetically engineered bacteria comprise a gene or gene cassette for producing a payload under the control of an oxygen level-dependent promoter. In a more specific aspect, the genetically engineered bacteria comprise a gene or gene cassette for producing a payload under the control of an oxygen level-dependent promoter that is activated under low-oxygen or anaerobic environments.

[0314] In certain embodiments, the bacterial cell comprises a gene encoding a payload which is operably linked to a fumarate and nitrate reductase regulator (FNR) responsive promoter. In certain embodiments, the bacterial cell comprises a gene encoding a payload expressed under the control of a fumarate and nitrate reductase regulator (FNR) responsive promoter. In E. coli, FNR is a major transcriptional activator that controls the switch from aerobic to anaerobic metabolism (Unden et al., 1997). In the anaerobic state, FNR dimerizes into an active DNA binding protein that activates hundreds of genes responsible for adapting to anaerobic growth. In the aerobic state, FNR is prevented from dimerizing by oxygen and is inactive. FNR responsive promoters include, but are not limited to, the FNR responsive promoters of SEQ ID NO: 563-579. Underlined sequences are predicted ribosome binding sites, and bolded sequences are restriction sites used for cloning.

[0315] FNR promoter sequences are known in the art, and any suitable FNR promoter sequence(s) may be used in the genetically engineered bacteria of the invention. Any suitable FNR promoter(s) may be combined with any suitable payload.

[0316] As used herein the term “payload” refers to one or more effector molecules, e.g. immune modulator(s), including but not limited to immune initiators and immune sustainers described herein.

[0317] Non-limiting FNR promoter sequences are provided in SEQ ID NO: 563-579. In some embodiments, the genetically engineered bacteria of the disclosure comprise a payload, e.g., an effector or an immune modulator, which is operably linked to a low oxygen inducible, e.g., FNR regulated promoter comprising: SEQ ID NO: 563, SEQ ID NO: 564, SEQ ID NO: 565, SEQ ID NO: 566, SEQ ID NO: 567, SEQ ID NO: 568, SEQ ID NO: 569, nirB1 promoter (SEQ ID NO: 570), nirB2 promoter (SEQ ID NO: 571), nirB3 promoter (SEQ ID NO: 572), ydfZ promoter (SEQ ID NO: 573), nirB promoter fused to a strong ribosome binding site (SEQ ID NO: 574), ydfZ promoter fused to a strong ribosome binding site (SEQ ID NO: 575), fnrS, an anaerobically induced small RNA gene (fnrS1 promoter SEQ ID NO: 576 or fnrS2 promoter SEQ ID NO: 577), nirB promoter fused to a crp binding site (SEQ ID NO: 578), and fnrS fused to a crp binding site (SEQ ID NO: 579). In some embodiments, the FNR-responsive promoter is at least about 80%, at least about 85%, at least about 90%, at least about 95%, or at least about 99% homologous to a sequence selected from SEQ ID NOs: 563-579. In another embodiment, the genetically engineered bacteria comprise a gene sequence comprising an FNR-responsive promoter comprising a sequence selected from SEQ ID NOs: 563-579. In yet another embodiment, the FNR-responsive promoter consists of a sequence selected from SEQ ID NOs: 563-579. In some embodiments, the genetically engineered bacteria of the disclosure comprise a gene encoding an effector molecule, e.g., an immune initiator or immune stimulator, which is operably linked to an FNR-responsive promoter which is at least about 80%, at least about 85%, at least about 90%, at least about 95%, or at least about 99% homologous to a sequence selected from SEQ ID NOs: 1281 or SEQ ID NO: 1282. In another embodiment, the genetically engineered bacteria comprise encode an effector molecule operably linked to an FNR-responsive promoter comprising a sequence selected from SEQ ID NOs: 1281 or SEQ ID NO: 1282. In yet another embodiment, the FNR-responsive promoter consists of a sequence selected from SEQ ID NOs: 1281 or SEQ ID NO: 1282.

[0318] In some embodiments, multiple distinct FNR nucleic acid sequences are inserted in the genetically engineered bacteria. In alternate embodiments, the genetically engineered bacteria comprise a gene encoding a payload expressed under the control of an alternate oxygen level-dependent promoter, e.g., DNR (Trunk et al., 2010) or ANR (Ray et al., 1997). In these embodiments, expression of the payload gene is particularly activated in a low-oxygen or anaerobic environment, such as in the gut. In some embodiments, gene expression is further optimized by methods known in the art, e.g., by optimizing ribosomal binding sites and/or increasing mRNA stability. In one embodiment, the mammalian gut is a human mammalian gut.

[0319] In another embodiment, the genetically engineered bacteria comprise the gene or gene cassette for producing an immune modulator expressed under the control of anaerobic regulation of arginine deiminase and nitrate reduction transcriptional regulator (ANR). In P. aeruginosa, ANR is “required for the expression of physiological functions which are inducible under oxygen-limiting or anaerobic conditions” (Winteler et al., 1996; Sawers 1991). P. aeruginosa ANR is homologous with E. coli FNR, and “the consensus FNR site (TTGAT-ATCAA) was recognized efficiently by ANR and FNR” (Winteler et al., 1996). Like FNR, in the anaerobic state, ANR activates numerous genes responsible for adapting to anaerobic growth. In the aerobic state, ANR is inactive. Pseudomonas fluorescens, Pseudomonas putida, Pseudomonas syringae, and Pseudomonas mendocina all have functional analogs of ANR (Zimmermann et al., 1991). Promoters that are regulated by ANR are known in the art, e.g., the promoter of the arcDABC operon (see, e.g., Hasegawa et al., 1998).

[0320] In other embodiments, the one or more gene sequence(s) for producing a payload are expressed under the control of an oxygen level-dependent promoter fused to a binding site for a transcriptional activator, e.g., CRP. CRP (cyclic AMP receptor protein or catabolite activator protein or CAP) plays a major regulatory role in bacteria by repressing genes responsible for the uptake, metabolism, and assimilation of less favorable carbon sources when rapidly metabolizable carbohydrates, such as glucose, are present (Wu et al., 2015). This preference for glucose has been termed glucose repression, as well as carbon catabolite repression (Deutscher, 2008; Görke and Stülke, 2008). In some embodiments, the gene or gene cassette for producing an immune modulator is controlled by an oxygen level-dependent promoter fused to a CRP binding site. In some embodiments, the one or more gene sequence(s) for a payload are controlled by a FNR promoter fused to a CRP binding site. In these embodiments, cyclic AMP binds to CRP when no glucose is present in the environment. This binding causes a conformational change in CRP, and allows CRP to bind tightly to its binding site. CRP binding then activates transcription of the gene or gene cassette by recruiting RNA polymerase to the FNR promoter via direct protein-protein interactions. In the presence of glucose, cyclic AMP does not bind to CRP and transcription of the gene or gene cassette for producing a payload is repressed. In some embodiments, an oxygen level-dependent promoter (e.g., an FNR promoter) fused to a binding site for a transcriptional activator is used to ensure that the gene or gene cassette for producing a payload is not expressed under anaerobic conditions when sufficient amounts of glucose are present, e.g., by adding glucose to growth media in vitro.

[0321] In some embodiments, the genetically engineered bacteria comprise an oxygen level-dependent promoter from a different species, strain, or substrain of bacteria. In some embodiments, the genetically engineered bacteria comprise an oxygen level-sensing transcription factor, e.g., FNR, ANR or DNR, from a different species, strain, or substrain of bacteria. In some embodiments, the genetically engineered bacteria comprise an oxygen level-sensing transcription factor and corresponding promoter from a different species, strain, or substrain of bacteria. The heterologous oxygen-level dependent transcriptional regulator and/or promoter increases the transcription of genes operably linked to said promoter, e.g., one or more gene sequence(s) for producing the payload(s) in a low-oxygen or anaerobic environment, as compared to the native gene(s) and promoter in the bacteria under the same conditions. In certain embodiments, the non-native oxygen-level dependent transcriptional regulator is an FNR protein from N. gonorrhoeae (see, e.g., Isabella et al., 2011). In some embodiments, the corresponding wild-type transcriptional regulator is left intact and retains wild-type activity. In alternate embodiments, the corresponding wild-type transcriptional regulator is deleted or mutated to reduce or eliminate wild-type activity.

[0322] In some embodiments, the genetically engineered bacteria comprise a wild-type oxygen-level dependent transcriptional regulator, e.g., FNR, ANR, or DNR, and corresponding promoter that is mutated relative to the wild-type promoter from bacteria of the same subtype. The mutated promoter enhances binding to the wild-type transcriptional regulator and increases the transcription of genes operably linked to said promoter, e.g., the gene encoding the payload, in a low-oxygen or anaerobic environment, as compared to the wild-type promoter under the same conditions. In some embodiments, the genetically engineered bacteria comprise a wild-type oxygen-level dependent promoter, e.g., FNR, ANR, or DNR promoter, and corresponding transcriptional regulator that is mutated relative to the wild-type transcriptional regulator from bacteria of the same subtype. The mutated transcriptional regulator enhances binding to the wild-type promoter and increases the transcription of genes operably linked to said promoter, e.g., the gene encoding the payload, in a low-oxygen or anaerobic environment, as compared to the wild-type transcriptional regulator under the same conditions. In certain embodiments, the mutant oxygen-level dependent transcriptional regulator is an FNR protein comprising amino acid substitutions that enhance dimerization and FNR activity (see, e.g., Moore et al., (2006). In some embodiments, both the oxygen level-sensing transcriptional regulator and corresponding promoter are mutated relative to the wild-type sequences from bacteria of the same subtype in order to increase expression of the payload in low-oxygen conditions.

[0323] In some embodiments, the bacterial cells comprise multiple copies of the endogenous gene encoding the oxygen level-sensing transcriptional regulator, e.g., the FNR gene. In some embodiments, the gene encoding the oxygen level-sensing transcriptional regulator is present on a plasmid. In some embodiments, the gene encoding the oxygen level-sensing transcriptional regulator and the gene encoding the payload are present on different plasmids. In some embodiments, the gene encoding the oxygen level-sensing transcriptional regulator and the gene encoding the payload are present on the same plasmid.

[0324] In some embodiments, the gene encoding the oxygen level-sensing transcriptional regulator is present on a chromosome. In some embodiments, the gene encoding the oxygen level-sensing transcriptional regulator and the gene encoding the payload are present on different chromosomes. In some embodiments, the gene encoding the oxygen level-sensing transcriptional regulator and the gene encoding the payload are present on the same chromosome. In some instances, it may be advantageous to express the oxygen level-sensing transcriptional regulator under the control of an inducible promoter in order to enhance expression stability. In some embodiments, expression of the transcriptional regulator is controlled by a different promoter than the promoter that controls expression of the gene encoding the payload. In some embodiments, expression of the transcriptional regulator is controlled by the same promoter that controls expression of the payload. In some embodiments, the transcriptional regulator and the payload are divergently transcribed from a promoter region.

### RNS-Dependent Regulation

[0325] In some embodiments, the genetically engineered bacterium that expresses a payload under the control of a promoter that is activated by inflammatory conditions. In one embodiment, the gene for producing the payload is expressed under the control of an inflammatory-dependent promoter that is activated in inflammatory environments, e.g., a reactive nitrogen species or RNS promoter. In some embodiments, the genetically engineered bacteria of the invention comprise a tunable regulatory region that is directly or indirectly controlled by a transcription factor that is capable of sensing at least one reactive nitrogen species. Suitable RNS inducible promoters, e.g., inducible by reactive nitrogen species are described in International Patent Application PCT/US2017/013072, filed Jan. 11, 2017, published as WO2017/123675, the contents of which is herein incorporated by reference in its entirety.

[0326] Examples of transcription factors that sense RNS and their corresponding RNS-responsive genes, promoters, and/or regulatory regions include, but are not limited to, those shown in Table 9.

TABLE 9
Examples of RNS-sensing transcription
factors and RNS-responsive genes

| RNS-sensing | Primarily | |
|---|---|---|
| transcription | capable of | Examples of responsive genes, promoters, |
| factor: | sensing: | and/or regulatory regions: |
| NsrR | NO | norB, aniA, nsrR, hmpA, ytfE, ygbA, hcp, |
| | | hcr, nrfA, aox |
| NorR | NO | norVW, nor |
| DNR | NO | norCB, nir, nor, nos |

### ROS-Dependent Regulation

[0327] In some embodiments, the genetically engineered bacterium that expresses a payload under the control of a promoter that is activated by conditions of cellular damage. In one embodiment, the gene for producing the payload is expressed under the control of a cellular damaged-dependent promoter that is activated in environments in which there is cellular or tissue damage, e.g., a reactive oxygen species or ROS promoter. In some embodiments, the genetically engineered bacteria of the invention comprise a tunable regulatory region that is directly or indirectly controlled by a transcription factor that is capable of sensing at least one reactive oxygen species. Suitable ROS inducible promoters, e.g., inducible by reactive oxygen species are described in International Patent Application PCT/US2017/013072, filed Jan. 11, 2017, published as WO2017/123675, the contents of which is herein incorporated by reference in its entirety.

[0328] Examples of transcription factors that sense ROS and their corresponding ROS-responsive genes, promoters, and/or regulatory regions include, but are not limited to, those shown in Table 10.

TABLE 10
Examples of ROS-sensing transcription
factors and ROS-responsive genes

| ROS-sensing | Primarily | |
|---|---|---|
| transcription | capable of | Examples of responsive genes, promoters, |
| factor: | sensing: | and/or regulatory regions: |
| OxyR | H₂O₂ | ahpC; ahpF; dps; dsbG; fhuF; flu; fur; gor; |
| | | grxA; hemH; katG; oxyS; sufA; sufB; sufC; |
| | | sufD; sufE; sufS; trxC; uxuA; yaaA; yaeH; |
| | | yaiA; ybjM; ydcH; ydeN; ygaQ; yljA; ytfK |
| PerR | H₂O₂ | katA; ahpCF; mrgA; zoaA; fur; |
| | | hemAXCDBL; srfA |
| OhrR | Organic | ohrA |
| | peroxides | |
| | NaOCl | |
| SoxR | •O₂⁻ | soxS |
| | NO• | |
| | (also | |
| | capable of | |
| | sensing | |
| | H₂O₂) | |
| RosR | H₂O₂ | rbtT; tnp16a; rluC1; tnp5a; mscL; tnp2d; |
| | | phoD; tnp15b; pstA; tnp5b; xylC; gabD1; |
| | | rluC2; cgtS9; azlC; narKGHJI; rosR |

### Other Promoters

[0329] In some embodiments, the genetically engineered bacteria comprise the gene or gene cassette for producing an immune modulator expressed under the control of an inducible promoter that is responsive to specific molecules or metabolites in the environment, e.g., a specific tissue, or the mammalian gut. Any molecule or metabolite found in the mammalian gut, in a healthy and/or disease state, may be used to induce payload expression.

[0330] In alternate embodiments, the gene or gene cassette for producing an immune modulator is operably linked to a nutritional or chemical inducer which is not present in the environment, e.g., a specific tissue, or the mammalian gut. In some embodiments, the nutritional or chemical inducer is administered prior, concurrently or sequentially with the genetically engineered bacteria.

### Other Inducible Promoters

[0331] In some embodiments, one or more gene sequence(s) encoding polypeptides of interest described herein is present on a plasmid and operably linked to promoter a directly or indirectly inducible by one or more nutritional and/or chemical inducer(s) and/or metabolite(s). In some embodiments, the bacterial cell comprises a stably maintained plasmid or chromosome carrying the gene encoding the immune modulator, which is induced by one or more nutritional and/or chemical inducer(s) and/or metabolite(s), such that the immune modulator can be expressed in the host cell, and the host cell is capable of survival and/or growth in vitro, e.g., under culture conditions, and/or in vivo, e.g., in the gut.

[0332] In some embodiments, expression of one or more viral antigen and/or one or more immune modulator(s) and/or other polypeptide(s) of interest is driven directly or indirectly by one or more arabinose, cumate, and salicylate inducible promoter(s) in vivo. In some embodiments, the promoter is directly or indirectly induced by a chemical and/or nutritional inducer and/or metabolite which is co-administered with the genetically engineered bacteria of the invention. In some embodiments, inducers are administered intranasally at a defined time before bacterial injection into the target site. In some embodiments, inducers are administered intranasally at a defined time after bacterial injection into the target site. In some embodiments, inducers are administered intranasally concurrently with bacterial injection into the target site. In some embodiments, inducers are administered intravenously at a defined time before bacterial injection into the target site. In some embodiments, inducers are administered intravenously at a defined time after bacterial injection into the target site. In some embodiments, inducers are administered intravenously concurrently with bacterial injection into the target site. In some embodiments, inducers are administered subcutaneously at a defined time before bacterial injection into the target site. In some embodiments, inducers are administered subcutaneously at a defined time after bacterial injection into the target site. In some embodiments, inducers are administered subcutaneously concurrently with bacterial injection into the target site.

[0333] In some embodiments, inducers are administered intranasally at a defined time before bacterial injection into the target site. In some embodiments, inducers are administered intranasally at a defined time after bacterial injection into the target site. In some embodiments, inducers are administered intranasally concurrently with bacterial injection into the target site. In some embodiments, inducers are administered intravenously at a defined time before bacterial injection into the target site. In some embodiments, inducers are administered intravenously at a defined time after bacterial injection into the target site. In some embodiments, inducers are administered intravenously concurrently with intravenous bacterial administration. In some embodiments, inducers are administered subcutaneously at a defined time before bacterial injection into the target site. In some embodiments, inducers are administered subcutaneously at a defined time after bacterial injection into the target site. In some embodiments, inducers are administered subcutaneously concurrently with intravenous bacterial administration.

[0334] In some embodiments, expression of one or more viral antigen and/or one or more immune modulator(s) and/or other polypeptide(s) of interest, is driven directly or indirectly by one or more promoter(s) induced by a chemical and/or nutritional inducer and/or metabolite during in vitro growth, preparation, or manufacturing of the strain prior to in vivo administration. In some embodiments, the promoter(s) induced by a chemical and/or nutritional inducer and/or metabolite are induced in culture, e.g., grown in a flask, fermenter or other appropriate culture vessel, e.g., used during cell growth, cell expansion, fermentation, recovery, purification, formulation, and/or manufacture. In some embodiments, the promoter is directly or indirectly induced by a molecule that is added to in the bacterial culture to induce expression and pre-load the bacterium with one or more viral antigen, and/or immune modulator(s) and/or other polypeptide(s) of interest prior to administration. In some embodiments, the cultures, which are induced by a chemical and/or nutritional inducer and/or metabolite, are grown aerobically. In some embodiments, the cultures, which are induced by a chemical and/or nutritional inducer and/or metabolite, are grown anaerobically.

[0335] In one embodiment, the gene encoding the effector or the immune modulator is operably linked to a promoter that is induced by salicylate or a derivative thereof. After over 100 years of clinical use, salicylate remains one of the world's most extensively used ‘over-the-counter’ drugs, and it is still recognized as the standard analgesic/antipyretic/anti-inflammatory agent by which newer drugs are assessed (Clissold; Salicylate and related derivatives of salicylic acid; Drugs. 1986; 32 Suppl 4:8-26). In an non-limiting example, the immune modulator is operably linked to a promoter PSal, as part of the salicylate PSal/NahR biosensor circuit (Part:BBa_J61051), originally adapted from Pseudomonas putida. The nahR gene was mined from the 83 kb naphthalene degradation plasmid NAH7 of Pseudomonas putida, encoding a 34 kDa protein which binds to nah and sal promoters to activate transcription in response to the inducer salicylate (Dunn, N. W., and I. C. Gunsalus (1973) Transmissible plasmid encoding early enzymes of naphthalene oxidation in Pseudomonas putida. J. Bacteriol. 114:974-979). In this system NahR is constitutively expressed by a constitutive promoter (Pc), and the expression of the protein of interest, e.g., the immune modulator is positively regulated by NahR in the presence of inducers (e.g., salicylate). Thus, in some embodiments, the genetically engineered bacteria comprise a gene sequence encoding an immune modulator which is operably linked to salicylate inducible promoter (e.g., PSal). In some embodiments, the genetically engineered bacteria further comprise gene sequence(s) encoding NahR, which are operably linked to a promoter. In some embodiments, NahR is under control of a constitutive promoter described herein or known in the art. In some embodiments, NahR is under control of an inducible promoter described herein or known in the art. In some embodiments described herein, the Biobrick BBa_J61051 (containing the gene encoding NahR driven by a constitutive promoter and the PSal promoter was cloned preceding dacA.

[0336] In one embodiment, expression of one or more immune modulator protein(s) of interest, e.g., one or more therapeutic polypeptide(s), is driven directly or indirectly by one or more salicylate inducible promoter(s).

[0337] In some embodiments, the salicylate inducible promoter is useful for or induced during in vivo expression of the one or more protein(s) of interest. In some embodiments, expression of one or more immune modulator protein(s) of interest is driven directly or indirectly by one or more salicylate inducible promoter(s) in vivo. In some embodiments, the promoter is directly or indirectly induced by a molecule that is co-administered with the genetically engineered bacteria of the invention, e.g., salicylate.

[0338] In some embodiments, salicylate is administered intranasally at a defined time before bacterial injection into the target site. In some embodiments, salicylate is administered intranasally at a defined time after bacterial injection into the target site. In some embodiments, salicylate is administered intranasally concurrently with bacterial injection into the target site. In some embodiments, salicylate is administered intravenously at a defined time before bacterial injection into the target site. In some embodiments, salicylate is administered intravenously at a defined time after bacterial injection into the target site. In some embodiments, salicylate is administered intravenously concurrently with bacterial injection into the target site. In some embodiments, salicylate is administered subcutaneously at a defined time before bacterial injection into the target site. In some embodiments, salicylate is administered subcutaneously at a defined time after bacterial injection into the target site. In some embodiments, salicylate is administered subcutaneously concurrently with bacterial injection into the target site.

[0339] In some embodiments, salicylate is administered intranasally at a defined time before bacterial injection into the target site. In some embodiments, salicylate is administered intranasally at a defined time after bacterial injection into the target site. In some embodiments, salicylate is administered intranasally concurrently with bacterial injection into the target site. In some embodiments, salicylate is administered intravenously at a defined time before bacterial injection into the target site. In some embodiments, salicylate is administered intravenously at a defined time after bacterial injection into the target site. In some embodiments, salicylate is administered intravenously concurrently with intravenous bacterial administration. In some embodiments, salicylate is administered subcutaneously at a defined time before bacterial injection into the target site. In some embodiments, salicylate is administered subcutaneously at a defined time after bacterial injection into the target site. In some embodiments, salicylate is administered subcutaneously concurrently with intravenous bacterial administration.

[0340] In some embodiments, expression of one or more protein(s) of interest, is driven directly or indirectly by one or more salicylate inducible promoter(s) during in vitro growth, preparation, or manufacturing of the strain prior to in vivo administration. In some embodiments, the salicylate inducible promoter(s) are induced in culture, e.g., grown in a flask, fermenter or other appropriate culture vessel, e.g., used during cell growth, cell expansion, fermentation, recovery, purification, formulation, and/or manufacture. In some embodiments, the promoter is directly or indirectly induced by a molecule that is added to in the bacterial culture to induce expression and pre-load the bacterium with the payload prior to administration, e.g., salicylate. In some embodiments, the cultures, which are induced by salicylate, are grown aerobically. In some embodiments, the cultures, which are induced by salicylate, are grown anaerobically.

[0341] In some embodiments, the salicylate inducible promoter drives the expression of one or more protein(s) of interest from a low-copy plasmid or a high copy plasmid or a biosafety system plasmid described herein. In some embodiments, the salicylate inducible promoter drives the expression of one or more protein(s) of interest from a construct which is integrated into the bacterial chromosome. Exemplary insertion sites are described herein.

[0342] In some embodiments, one or more protein(s) of interest are linked to and are driven by the native salicylate inducible promoter In some embodiments, the genetically engineered bacteria comprise one or more gene sequence(s) having at least 80%, 81%, 82%, 83%, 84%, 85%, 86%, 87%, 88%, 89%, 90%, 91%, 92%, 93%, 94%, 95%, 96%, 97%, 98%, or 99% identity with SEQ ID NO: 1273 or SEQ ID NO: 1274.

[0343] In one embodiment, the genetically engineered bacteria comprise a gene sequence comprising SEQ ID NO: 1273 or SEQ ID NO: 1274. In another embodiment, the genetically engineered bacteria comprise a gene sequence which consists of SEQ ID NO: 1273 or SEQ ID NO: 1274.

[0344] In some embodiments, the salicylate inducible construct further comprises a gene encoding NahR, which in some embodiments is divergently transcribed from a constitutive or inducible promoter. In some embodiments, the genetically engineered bacteria comprise one or more gene sequence(s) having at least 80%, 81%, 82%, 83%, 84%, 85%, 86%, 87%, 88%, 89%, 90%, 91%, 92%, 93%, 94%, 95%, 96%, 97%, 98%, or 99% identity with SEQ ID NO: 1278. In another embodiment, the genetically engineered bacteria comprise a gene sequence comprising SEQ ID NO: 1278. In another embodiment, the genetically engineered bacteria comprise a gene sequence which consists of SEQ ID NO: 1278.

[0345] In some embodiments, the genetically engineered bacteria comprise one or more gene sequence(s) encoding a polypeptide having at least 80%, 81%, 82%, 83%, 84%, 85%, 86%, 87%, 88%, 89%, 90%, 91%, 92%, 93%, 94%, 95%, 96%, 97%, 98%, or 99% identity with the polypeptide encoded by SEQ ID NO: 1280. In another embodiment, the genetically engineered bacteria comprise a gene sequence encoding a polypeptide comprising SEQ ID NO: 1280. In yet another embodiment, the polypeptide expressed by the genetically engineered bacteria consists of SEQ ID NO: 1280.

[0346] In one embodiment, the gene encoding the immune modulator is operably linked to a promoter that is induced by cumate or a derivative thereof. Suitable derivatives are known in the art and are for example described in U.S. Pat. No. 7,745,592. Benefits of cumate induction include that Cumate is non-toxic, water-soluble and inexpensive. The basic mechanism by which the cumate-regulated expression functions in the native P. putida F1 and how it is applied to other bacterial chassis, including but not limited to, E. coli has been previously described (see e.g., Choi et al., Novel, Versatile, and Tightly Regulated Expression System for Escherichia coli Strains; Appl. Environ. Microbiol. August 2010 vol. 76 no. 15 5058-5066). Essentially, the cumate circuit or switch includes four components: a strong promoter, a repressor-binding DNA sequence or operator, expression of cymR, a repressor, and cumate as the inducer. The addition of the inducer changes causes the formation of a complex between cumate and CymR and results in the removal of the repressor from its DNA binding site, allowing expression of the gene of interest. A construct comprising the cymR gene driven by a constitutive promoter and a cymR responsive promoter was cloned in front of the DacA gene to allow cumate inducible expression of DacA is described elsewhere herein.

[0347] In one embodiment, expression of one or more immune modulator protein(s) of interest, e.g., one or more therapeutic polypeptide(s), is driven directly or indirectly by one or more promoter(s) inducible by cumate or a derivative thereof.

[0348] In some embodiments, the cumate inducible promoter is useful for or induced during in vivo expression of the one or more protein(s) of interest. In some embodiments, expression of one or more immune modulator protein(s) of interest is driven directly or indirectly by one or more cumate inducible promoter(s) in vivo. In some embodiments, the promoter is directly or indirectly induced by a molecule that is co-administered with the genetically engineered bacteria of the invention, e.g., cumate.

[0349] In some embodiments, cumate is administered intranasally at a defined time before bacterial injection into the target site. In some embodiments, cumate is administered intranasally at a defined time after bacterial injection into the target site. In some embodiments, cumate is administered intranasally concurrently with bacterial injection into the target site. In some embodiments, cumate is administered intravenously at a defined time before bacterial injection into the target site. In some embodiments, cumate is administered intravenously at a defined time after bacterial injection into the target site. In some embodiments, cumate is administered intravenously concurrently with bacterial injection into the target site. In some embodiments, cumate is administered subcutaneously at a defined time before bacterial injection into the target site. In some embodiments, cumate is administered subcutaneously at a defined time after bacterial injection into the target site. In some embodiments, cumate is administered subcutaneously concurrently with bacterial injection into the target site.

[0350] In some embodiments, cumate is administered intranasally at a defined time before bacterial injection into the target site. In some embodiments, cumate is administered intranasally at a defined time after bacterial injection into the target site. In some embodiments, cumate is administered intranasally concurrently with bacterial injection into the target site. In some embodiments, cumate is administered intravenously at a defined time before bacterial injection into the target site. In some embodiments, cumate is administered intravenously at a defined time after bacterial injection into the target site. In some embodiments, cumate is administered intravenously concurrently with intravenous bacterial administration. In some embodiments, cumate is administered subcutaneously at a defined time before bacterial injection into the target site. In some embodiments, cumate is administered subcutaneously at a defined time after bacterial injection into the target site. In some embodiments, cumate is administered subcutaneously concurrently with intravenous bacterial administration

[0351] In some embodiments, expression of one or more protein(s) of interest, is driven directly or indirectly by one or more cumate inducible promoter(s) during in vitro growth, preparation, or manufacturing of the strain prior to in vivo administration. In some embodiments, the cumate inducible promoter(s) are induced in culture, e.g., grown in a flask, fermenter or other appropriate culture vessel, e.g., used during cell growth, cell expansion, fermentation, recovery, purification, formulation, and/or manufacture. In some embodiments, the promoter is directly or indirectly induced by a molecule that is added to in the bacterial culture to induce expression and pre-load the bacterium with the payload prior to administration, e.g., cumate. In some embodiments, the cultures, which are induced by cumate, are grown aerobically. In some embodiments, the cultures, which are induced by cumate, are grown anaerobically.

[0352] In some embodiments, the cumate inducible promoter drives the expression of one or more protein(s) of interest from a low-copy plasmid or a high copy plasmid or a biosafety system plasmid described herein. In some embodiments, the cumate inducible promoter drives the expression of one or more protein(s) of interest from a construct which is integrated into the bacterial chromosome. Exemplary insertion sites are described herein.

[0353] In some embodiments, one or more protein(s) of interest are operably linked to by the native cumate inducible promoter. In some embodiments, the genetically engineered bacteria comprise one or more gene sequence(s) having at least 80%, 81%, 82%, 83%, 84%, 85%, 86%, 87%, 88%, 89%, 90%, 91%, 92%, 93%, 94%, 95%, 96%, 97%, 98%, or 99% identity with SEQ ID NO: 1270 or SEQ ID NO: 1271.

[0354] In one embodiment, the genetically engineered bacteria comprise a gene sequence comprising SEQ ID NO: 1270 or SEQ ID NO: 1271. In another embodiment, the genetically engineered bacteria comprise a gene sequence which consists of SEQ ID NO: 1270 or SEQ ID NO: 1271.

[0355] In some embodiments, the cumate inducible construct further comprises a gene encoding CymR, which in some embodiments is divergently transcribed from a constitutive or inducible promoter. In some embodiments, the genetically engineered bacteria comprise one or more gene sequence(s) having at least 80%, 81%, 82%, 83%, 84%, 85%, 86%, 87%, 88%, 89%, 90%, 91%, 92%, 93%, 94%, 95%, 96%, 97%, 98%, or 99% identity with SEQ ID NO: 1268. In another embodiment, the genetically engineered bacteria comprise a gene sequence comprising SEQ ID NO: 1268. In another embodiment, the genetically engineered bacteria comprise a gene sequence which consists of SEQ ID NO: 1268.

[0356] In some embodiments, the genetically engineered bacteria comprise one or more gene sequence(s) encoding a polypeptide having at least 80%, 81%, 82%, 83%, 84%, 85%, 86%, 87%, 88%, 89%, 90%, 91%, 92%, 93%, 94%, 95%, 96%, 97%, 98%, or 99% identity with the polypeptide encoded by SEQ ID NO: 1269. In another embodiment, the genetically engineered bacteria comprise a gene sequence encoding a polypeptide comprising SEQ ID NO: 1269. In yet another embodiment, the polypeptide expressed by the genetically engineered bacteria consists of SEQ ID NO: 1269.

[0357] Other inducible promoters contemplated in the disclosure are described in are described in International Patent Application PCT/US2017/013072, filed Jan. 11, 2017, published as WO2017/123675, the contents of which is herein incorporated by reference in its entirety. Such promoters include arabinose inducible, rhamnose inducible, and IPTG inducible promoters, tetracycline inducible promoters, temperature inducible promoters, and PSSB promoter. These promoters can be used in combination with each other or with other inducible promoters, such as low oxygen inducible promoters, or constitutive promoters to fine tune expression of different effectors, e.g., in one bacterium or in a composition of more than one strain of bacteria.

### Constitutive Promoters

[0358] In some embodiments, the gene encoding the payload is present on a plasmid and operably linked to a constitutive promoter. In some embodiments, the gene encoding the payload is present on a chromosome and operably linked to a constitutive promoter.

[0359] In some embodiments, the constitutive promoter is active under in vivo conditions, as described herein. In some embodiments, the promoters is active under in vitro conditions, e.g., various cell culture and/or cell manufacturing conditions, as described herein. In some embodiments, the constitutive promoter is active under in vivo conditions, as described herein, and under in vitro conditions, e.g., various cell culture and/or cell production and/or manufacturing conditions, as described herein.

[0360] In some embodiments, the constitutive promoter that is operably linked to the gene encoding the payload is active in various exogenous environmental conditions (e.g., in vivo and/or in vitro and/or production/manufacturing conditions).

[0361] In some embodiments, the constitutive promoter is active in exogenous environmental conditions specific to the target sites. In some embodiments, the constitutive promoter is active in exogenous environmental conditions specific to the pulmonary system of a mammal. In some embodiments, the constitutive promoter is active in the presence of molecules or metabolites that are specific to the pulmonary system of a mammal. In some embodiments, the constitutive promoter is directly or indirectly induced by a molecule that is co-administered with the bacterial cell. In some embodiments, the constitutive promoter is active in the presence of molecules or metabolites or other conditions, that are present during in vitro culture, cell production and/or manufacturing conditions. Bacterial constitutive promoters are known in the art and are described in are described in International Patent Application PCT/US2017/013072, filed Jan. 11, 2017, published as WO2017/123675, the contents of which is herein incorporated by reference in its entirety. Examples are included herein in SEQ ID NO: 598-739 and a subset is shown in Table 11.

TABLE 11
Promoters

| | | SEQ |
|---|---|---|
| | | ID |
| Name | Description | NO |
| Plpp | The Plpp promoter is a natural promoter taken from the Nissle | 740 |
| | genome. In situ it is used to drive production of lpp, which is known | |
| | to be the most abundant protein in the cell. Also, in some previous | |
| | RNAseq experiments I was able to confirm that the lpp mRNA is one | |
| | of the most abundant mRNA in Nissle during exponential growth. | |
| PapFAB46 | See, e.g., Kosuri, S., Goodman, D. B. & Cambray, G. Composability | 741 |
| | of regulatory sequences controlling transcription and translation in | |
| | Escherichia coli. in 1-20 (2013). doi:10.1073/pnas. | |
| PJ23101 + UP | UP element helps recruit RNA polymerase (ggaaaatttttttaaaaaaaaaac | 742 |
| element | (SEQ ID NO: 1250)) | |
| PJ23107 + UP | UP element helps recruit RNA polymerase (ggaaaatttttttaaaaaaaaaac | 743 |
| element | (SEQ ID NO: 1250)) | |
| PSYN23119 | UP element at 5’ end; consensus -10 region is TATAAT; the | 744 |
| | consensus -35 is TTGACA; the extended -10 region is generally | |
| | TGNTATAAT (TGGTATAAT in this sequence) | |

[0362] In some embodiments, the promoter is Plpp or a derivative thereof. In some embodiments, the promoter comprises a sequence from SEQ ID NO:740. In some embodiments, the constitutive promoter is at least about 80%, at least about 85%, at least about 90%, at least about 95%, or at least about 99% homologous to the sequence of SEQ ID NO: 740. In some embodiments, the promoter is PapFAB46 or a derivative thereof. In some embodiments, the promoter comprises a sequence from SEQ ID NO:741. In some embodiments, the constitutive promoter is at least about 80%, at least about 85%, at least about 90%, at least about 95%, or at least about 99% homologous to the sequence of SEQ ID NO: 741. In some embodiments, the promoter is PJ23101+UP element or a derivative thereof. In some embodiments, the promoter comprises a sequence from SEQ ID NO:742. In some embodiments, the constitutive promoter is at least about 80%, at least about 85%, at least about 90%, at least about 95%, or at least about 99% homologous to the sequence of SEQ ID NO: 742. In some embodiments, the promoter is PJ23107+UP element or a derivative thereof. In some embodiments, the promoter comprises a sequence from SEQ ID NO:743. In some embodiments, the constitutive promoter is at least about 80%, at least about 85%, at least about 90%, at least about 95%, or at least about 99% homologous to the sequence of SEQ ID NO: 743. In some embodiments, the promoter is PSYN23119 or a derivative thereof. In some embodiments, the promoter comprises a sequence from SEQ ID NO:744. In some embodiments, the constitutive promoter is at least about 80%, at least about 85%, at least about 90%, at least about 95%, or at least about 99% homologous to the sequence of SEQ ID NO: 744.

[0363] Additional promoters which may be linked to the payload include apFAB124 (tcgacatttatcccttgcggcgaatacttacagccatagcaa (SEQ ID NO: 1443)); apfab338 (GGCGCGCC TTGACAATTAATCATCCGGCTCCTAGGATGTGTGGAGGGAC (SEQ ID NO: 1444)), apFAB66 (GGCGCGCC TTGACATCAGGAAAATTTTTCTGTATAATAGATTCATCTCAA (SEQ ID NO: 1445)), and apFAB54 (GGCGCGCC TTGACATAAAGTCTAACCTATAGGATACTTACAGCCATACAAG (SEQ ID NO: 1446)). In some embodiments, the promoter is apFAB124 or a derivative thereof. In some embodiments, the promoter comprises a sequence of apFAB124. In some embodiments, the constitutive promoter is at least about 80%, at least about 85%, at least about 90%, at least about 95%, or at least about 99% homologous to the sequence of apFAB124. In some embodiments, the promoter is apFAB338 or a derivative thereof. In some embodiments, the promoter comprises a sequence of apFAB338. In some embodiments, the constitutive promoter is at least about 80%, at least about 85%, at least about 90%, at least about 95%, or at least about 99% homologous to the sequence of apFAB338. In some embodiments, the promoter is apFAB66 or a derivative thereof. In some embodiments, the promoter comprises a sequence of apFAB66. In some embodiments, the constitutive promoter is at least about 80%, at least about 85%, at least about 90%, at least about 95%, or at least about 99% homologous to the sequence of apFAB66. In some embodiments, the promoter is apFAB54 or a derivative thereof. In some embodiments, the promoter comprises a sequence of apFAB54. In some embodiments, the constitutive promoter is at least about 80%, at least about 85%, at least about 90%, at least about 95%, or at least about 99% homologous to the sequence of apFAB54.

### Ribosome Binding Sites

[0364] In some embodiments, ribosome binding sites are added, switched out or replaced. By testing a few ribosome binding sites, expression levels can be fine-tuned to the desired level. In some embodiments, RBS which are suitable for prokaryotic expression and can be used to achieve the desired expression levels are selected. Non-limiting examples of RBS are listed at Registry of standard biological parts and are described in are described in International Patent Application PCT/US2017/013072, filed Jan. 11, 2017, published as WO2017/123675, the contents of which is herein incorporated by reference in its entirety. Suitable examples are shown in SEQ ID NO: 1018-1050 and 869-871, 873-877, 880-887.

### Induction of Payloads During Strain Culture

[0365] Induction of payloads during culture is described in International Patent Application PCT/US2017/013072, filed Jan. 11, 2017, published as WO2017/123675, the contents of which is herein incorporated by reference in its entirety.

[0366] In some embodiments, it is desirable to pre-induce payload or protein of interest expression and/or payload activity prior to administration. Such payload or protein of interest may be an effector intended for secretion or may be an enzyme which catalyzes a metabolic reaction to produce an effector. In other embodiments, the protein of interest is an enzyme which catabolizes a harmful metabolite. In such situations, the strains are pre-loaded with active payload or protein of interest. In such instances, the genetically engineered bacteria of the invention express one or more protein(s) of interest, under conditions provided in bacterial culture during cell growth, expansion, purification, fermentation, and/or manufacture prior to administration in vivo. Such culture conditions can be provided in a flask, fermenter or other appropriate culture vessel, e.g., used during cell growth, cell expansion, fermentation, recovery, purification, formulation, and/or manufacture. As used herein, the term “bacterial culture” or bacterial cell culture” or “culture” refers to bacterial cells or microorganisms, which are maintained or grown in vitro during several production processes, including cell growth, cell expansion, recovery, purification, fermentation, and/or manufacture. As used herein, the term “fermentation” refers to the growth, expansion, and maintenance of bacteria under defined conditions. Fermentation may occur under a number of cell culture conditions, including anaerobic or low oxygen or oxygenated conditions, in the presence of inducers, nutrients, at defined temperatures, and the like.

[0367] Culture conditions are selected to achieve optimal activity and viability of the cells, while maintaining a high cell density (high biomass) yield. A number of cell culture conditions and operating parameters are monitored and adjusted to achieve optimal activity, high yield and high viability, including oxygen levels (e.g., low oxygen, microaerobic, aerobic), temperature of the medium, and nutrients and/or different growth media, chemical and/or nutritional inducers and other components provided in the medium.

[0368] In some embodiments, the one or more protein(s) of interest and are directly or indirectly induced, while the strains is grown up for in vivo administration. Without wishing to be bound by theory, pre-induction may boost in vivo activity. If the bacterial residence time in a particular pulmonary compartment is relatively short, the bacteria may pass through without reaching full in vivo induction capacity. In contrast, if a strain is pre-induced and preloaded, the strains are already fully active, allowing for greater activity more quickly as the bacteria reach the pulmonary system. Ergo, no transit time is “wasted”, in which the strain is not optimally active. As the bacteria continue to move through the pulmonary system, in vivo induction occurs under environmental conditions of the pulmonary system. Similarly, systemic administration or intranasal delivery, as described herein, of other bacterium may allow for greater activity more quickly as the bacteria reach the target site.

[0369] In one embodiment, expression of one or more payload(s), is induced during cell growth, cell expansion, fermentation, recovery, purification, formulation, and/or manufacture. In one embodiment, expression of several different proteins of interest is induced during cell growth, cell expansion, fermentation, recovery, purification, formulation, and/or manufacture.

[0370] In some embodiments, the strains are administered without any pre-induction protocols during strain growth prior to in vivo administration.

### Anaerobic Induction

[0371] In some embodiments, cells are induced under anaerobic or low oxygen conditions in culture. In such instances, cells are grown (e.g., for 1.5 to 3 hours) until they have reached a certain OD, e.g., ODs within the range of 0.1 to 10, indicating a certain density e.g., ranging from 1×10\hat{ }8 to 1×10\hat{ }11, and exponential growth and are then switched to anaerobic or low oxygen conditions for approximately 3 to 5 hours. In some embodiments, strains are induced under anaerobic or low oxygen conditions, e.g. to induce FNR promoter activity and drive expression of one or more payload(s) and/or transporters under the control of one or more FNR promoters.

[0372] In one embodiment, expression of one or more payload(s), is under the control of one or more FNR promoter(s) and is induced during cell growth, cell expansion, fermentation, recovery, purification, formulation, and/or manufacture under anaerobic or low oxygen conditions. In one embodiment, expression of several different proteins of interest is under the control of one or more FNR promoter(s) and is induced during cell growth, cell expansion, fermentation, recovery, purification, formulation, and/or manufacture under anaerobic or low oxygen conditions.

[0373] Without wishing to be bound by theory, strains that comprise one or more payload(s) under the control of an FNR promoter, may allow expression of payload(s) from these promoters in vitro, under anaerobic or low oxygen culture conditions, and in vivo.

[0374] In some embodiments, promoters linked to the payload of interest may be inducible by arabinose, cumate, and salicylate, IPTG, rhamnose, tetracycline, and/or other chemical and/or nutritional inducers can be induced under anaerobic or low oxygen conditions in the presence of the chemical and/or nutritional inducer. In particular, strains may comprise a combination of gene sequence(s), some of which are under control of FNR promoters and others which are under control of promoters induced by chemical and/or nutritional inducers. In some embodiments, strains may comprise one or more payload gene sequence(s) and/or under the control of one or more FNR promoter(s), and one or more payload gene sequence(s) under the control of a one or more constitutive promoter(s) described herein.

### Aerobic Induction

[0375] In some embodiments, it is desirable to prepare, pre-load and pre-induce the strains under aerobic conditions. This allows more efficient growth and viability, and, in some cases, reduces the build-up of toxic metabolites. In such instances, cells are grown (e.g., for 1.5 to 3 hours) until they have reached a certain OD, e.g., ODs within the range of 0.1 to 10, indicating a certain density e.g., ranging from 1×10\hat{ }8 to 1×10\hat{ }11, and exponential growth and are then induced through the addition of the inducer or through other means, such as shift to a permissive temperature, for approximately 3 to 5 hours.

[0376] In some embodiments, promoters inducible by arabinose, cumate, and salicylate, IPTG, rhamnose, tetracycline, and/or other chemical and/or nutritional inducers described herein or known in the art can be induced under aerobic conditions in the presence of the chemical and/or nutritional inducer during cell growth, cell expansion, fermentation, recovery, purification, formulation, and/or manufacture. In one embodiment, expression of one or more payload(s) is under the control of one or more promoter(s) regulated by chemical and/or nutritional inducers and is induced during cell growth, cell expansion, fermentation, recovery, purification, formulation, and/or manufacture under aerobic conditions.

[0377] In some embodiments, genetically engineered strains comprise gene sequence(s) which are induced under aerobic culture conditions. In some embodiments, these strains further comprise FNR inducible gene sequence(s) for in vivo activation. In some embodiments, these strains do not further comprise FNR inducible gene sequence(s) for in vivo activation.

### Microaerobic Induction

[0378] In some embodiments, viability, growth, and activity are optimized by pre-inducing the bacterial strain under microaerobic conditions. In some embodiments, microaerobic conditions are best suited to “strike a balance” between optimal growth, activity and viability conditions and optimal conditions for induction; in particular, if the expression of the one or more payload(s) are driven by an anaerobic and/or low oxygen promoter, e.g., a FNR promoter. In such instances, cells are for example grown (e.g., for 1.5 to 3 hours) until they have reached a certain OD, e.g., ODs within the range of 0.1 to 10, indicating a certain density e.g., ranging from 1×10\hat{ }8 to 1×10\hat{ }11, and exponential growth and are then induced through the addition of the inducer or through other means, such as shift to at a permissive temperature, for approximately 3 to 5 hours.

[0379] In one embodiment, expression of one or more payload(s) is under the control of one or more FNR promoter(s) and is induced during cell growth, cell expansion, fermentation, recovery, purification, formulation, and/or manufacture under microaerobic conditions.

[0380] Without wishing to be bound by theory, strains that comprise one or more payload(s) under the control of an FNR promoter, may allow expression of payload(s) from these promoters in vitro, under microaerobic culture conditions, and in vivo, under the low oxygen conditions.

[0381] In some embodiments, promoters inducible by arabinose, cumate, and salicylate, IPTG, rhamnose, tetracycline, and/or other chemical and/or nutritional inducers can be induced under microaerobic conditions in the presence of the chemical and/or nutritional inducer. In particular, strains may comprise a combination of gene sequence(s), some of which are under control of FNR promoters and others which are under control of promoters induced by chemical and/or nutritional inducers. In some embodiments, strains may comprise one or more payload gene sequence(s) under the control of one or more FNR promoter(s), and one or more payload gene sequence(s) under the control of a one or more constitutive promoter(s) described herein.

[0382] In one embodiment, expression of one or more payload(s) is under the control of one or more promoter(s) regulated by chemical and/or nutritional inducers and is induced during cell growth, cell expansion, fermentation, recovery, purification, formulation, and/or manufacture under microaerobic conditions.

Induction of Strains Using Phasing, Pulsing and/or Cycling

[0383] In some embodiments, cycling, phasing, or pulsing techniques are employed during cell growth, expansion, recovery, purification, fermentation, and/or manufacture to efficiently induce and grow the strains prior to in vivo administration. This method is used to “strike a balance” between optimal growth, activity, cell health, and viability conditions and optimal conditions for induction; in particular, if growth, cell health or viability are negatively affected under inducing conditions. In such instances, cells are grown (e.g., for 1.5 to 3 hours) in a first phase or cycle until they have reached a certain OD, e.g., ODs within the range of 0.1 to 10, indicating a certain density e.g., ranging from 1×10\hat{ }8 to 1×10\hat{ }11, and are then induced through the addition of the inducer or through other means, such as shift to a permissive temperature (if a promoter is thermoregulated), or change in oxygen levels (e.g., reduction of oxygen level in the case of induction of an FNR promoter driven construct) for approximately 3 to 5 hours. In a second phase or cycle, conditions are brought back to the original conditions which support optimal growth, cell health and viability. Alternatively, if a chemical and/or nutritional inducer is used, then the culture can be spiked with a second dose of the inducer in the second phase or cycle.

[0384] In some embodiments, two cycles of optimal conditions and inducing conditions are employed (i.e., growth, induction, recovery and growth, induction). In some embodiments, three cycles of optimal conditions and inducing conditions are employed. In some embodiments, four or more cycles of optimal conditions and inducing conditions are employed. In a non-liming example, such cycling and/or phasing is used for induction under anaerobic and/or low oxygen conditions (e.g., induction of FNR promoters). In one embodiment, cells are grown to the optimal density and then induced under anaerobic and/or low oxygen conditions. Before growth and/or viability are negatively impacted due to stressful induction conditions, cells are returned to oxygenated conditions to recover, after which they are then returned to inducing anaerobic and/or low oxygen conditions for a second time. In some embodiments, these cycles are repeated as needed.

[0385] In some embodiments, growing cultures are spiked once with the chemical and/or nutritional inducer. In some embodiments, growing cultures are spiked twice with the chemical and/or nutritional inducer. In some embodiments, growing cultures are spiked three or more times with the chemical and/or nutritional inducer. In a non-limiting example, cells are first grown under optimal growth conditions up to a certain density, e.g., for 1.5 to 3 hour) to reach an of 0.1 to 10, until the cells are at a density ranging from 1×10\hat{ }8 to 1×10\hat{ }11. Then the chemical inducer, e.g., arabinose, cumate, and salicylate or IPTG, is added to the culture. After 3 to 5 hours, an additional dose of the inducer is added to re-initiate the induction. Spiking can be repeated as needed.

[0386] In some embodiments, payload(s) induced during cell growth, cell expansion, fermentation, recovery, purification, formulation, and/or manufacture by using phasing or cycling or pulsing or spiking techniques are under the control of different inducible promoters, for example two different chemical inducers. In other embodiments, the payload is induced under low oxygen conditions or microaerobic conditions and a second payload is induced by a chemical inducer.

### Secretion

[0387] In any of the embodiments described herein, in which the genetically engineered microorganism produces a protein, polypeptide, peptide, or other immune modulatory, DNA, RNA, small molecule or other molecule intended to be secreted from the microorganism, such as a viral antigen and/or STING agonist, the engineered microorganism may comprise a secretion mechanism and corresponding gene sequence(s) encoding the secretion system.

[0388] In some embodiments, the genetically engineered bacteria further comprise a native secretion mechanism or non-native secretion mechanism that is capable of secreting the immune modulator from the bacterial cytoplasm in the extracellular environment. Many bacteria have evolved sophisticated secretion systems to transport substrates across the bacterial cell envelope. Substrates, such as small molecules, proteins, and DNA, may be released into the extracellular space or periplasm (such as the gut lumen or other space), injected into a target cell, or associated with the bacterial membrane.

[0389] In Gram-negative bacteria, secretion machineries may span one or both of the inner and outer membranes. In order to translocate a protein, e.g., therapeutic polypeptide, to the extracellular space, the polypeptide must first be translated intracellularly, mobilized across the inner membrane and finally mobilized across the outer membrane. Many effector proteins (e.g., therapeutic polypeptides)—particularly those of eukaryotic origin—contain disulphide bonds to stabilize the tertiary and quaternary structures. While these bonds are capable of correctly forming in the oxidizing periplasmic compartment with the help of periplasmic chaperones, in order to translocate the polypeptide across the outer membrane the disulphide bonds must be reduced and the protein unfolded again.

[0390] Suitable secretion systems for secretion of heterologous polypeptides, e.g., effector molecules, from gram negative and gram positive bacteria are described in International Patent Application PCT/US2017/013072, filed Jan. 11, 2017, published as WO2017/123675, the contents of which is herein incorporated by reference in its entirety. Such secretion systems include Double membrane-spanning secretion systems include, but are not limited to, the type I secretion system (T1SS), the type II secretion system (T2SS), the type III secretion system (T3SS), the type IV secretion system (T4SS), the type VI secretion system (T6SS), and the resistance-nodulation-division (RND) family of multi-drug efflux pumps, and type VII secretion system (T7SS). Alternatively, hemolysin-based secretion systems, Type V autotransporter secretion systems, traditional or modified type III or a type III-like secretion systems (T3SS), a flagellar type III secretion pathway may be used. In some embodiments, non-native single membrane-spanning secretion systems, e.g. Tat or Tat-like systems or See or Sec like systems may be used. Any of the secretion systems described herein and in PCT/US2017/013072 may according to the disclosure be employed to secrete the polypeptides of interest.

[0391] One way to secrete properly folded proteins in gram-negative bacteria—particularly those requiring disulphide bonds—is to target the reducing-environment periplasm in conjunction with a destabilizing outer membrane. In this manner the protein is mobilized into the oxidizing environment and allowed to fold properly. In contrast to orchestrated extracellular secretion systems, the protein is then able to escape the periplasmic space in a correctly folded form by membrane leakage. These “leaky” gram-negative mutants are therefore capable of secreting bioactive, properly disulphide-bonded polypeptides. In some embodiments, the genetically engineered bacteria have a “leaky” or de-stabilized outer membrane (DOM). Destabilizing the bacterial outer membrane to induce leakiness can be accomplished by deleting or mutagenizing genes responsible for tethering the outer membrane to the rigid peptidoglycan skeleton, including for example, lpp, ompC, ompA, ompF, tolA, tolB, and pal. Lpp is the most abundant polypeptide in the bacterial cell existing at ˜500,000 copies per cell and functions as the primary ‘staple’ of the bacterial cell wall to the peptidoglycan. TolA-PAL and OmpA complexes function similarly to Lpp and are other deletion targets to generate a leaky phenotype. Additionally, leaky phenotypes have been observed when periplasmic proteases are inactivated. The periplasm is very densely packed with protein and therefore encode several periplasmic proteins to facilitate protein turnover. Removal of periplasmic proteases such as degS, degP or nlpI can induce leaky phenotypes by promoting an excessive build-up of periplasmic protein. Mutation of the proteases can also preserve the effector polypeptide by preventing targeted degradation by these proteases.

[0392] Moreover, a combination of these mutations may synergistically enhance the leaky phenotype of the cell without major sacrifices in cell viability. Thus, in some embodiments, the engineered bacteria have one or more deleted or mutated membrane genes. In some embodiments, the engineered bacteria have a deleted or mutated lpp gene. In some embodiments, the engineered bacteria have one or more deleted or mutated gene(s), selected from ompA, ompA, and ompF genes. In some embodiments, the engineered bacteria have one or more deleted or mutated gene(s), selected from tolA, tolB, and pal genes. in some embodiments, the engineered bacteria have one or more deleted or mutated periplasmic protease genes. In some embodiments, the engineered bacteria have one or more deleted or mutated periplasmic protease genes selected from degS, degP, and nlpl. In some embodiments, the engineered bacteria have one or more deleted or mutated gene(s), selected from lpp, ompA, ompF, tolA, tolB, pal, degS, degP, and nlpl genes.

[0393] To minimize disturbances to cell viability, the leaky phenotype can be made inducible by placing one or more membrane or periplasmic protease genes, e.g., selected from lpp, ompA, ompF, tolA, tolB, pal, degS, degP, and nlpl, under the control of an inducible promoter. For example, expression of lpp or other cell wall stability protein or periplasmic protease can be repressed in conditions where the therapeutic polypeptide needs to be delivered (secreted). For instance, under inducing conditions a transcriptional repressor protein or a designed antisense RNA can be expressed which reduces transcription or translation of a target membrane or periplasmic protease gene. Conversely, overexpression of certain peptides can result in a destabilized phenotype, e.g., overexpression of colicins or the third topological domain of TolA, wherein peptide overexpression can be induced in conditions in which the therapeutic polypeptide needs to be delivered (secreted). These sorts of strategies would decouple the fragile, leaky phenotypes from biomass production. Thus, in some embodiments, the engineered bacteria have one or more membrane and/or periplasmic protease genes under the control of an inducible promoter.

[0394] In some embodiments in which the one or more proteins of interest or therapeutic proteins are secreted or exported from the microorganism, the engineered microorganism comprises gene sequence(s) that includes a secretion tag. In some embodiments, the one or more proteins of interest or therapeutic proteins include a “secretion tag” of either RNA or peptide origin to direct the one or more proteins of interest or therapeutic proteins to specific secretion systems. The secretion tag can be from the see or the tat system.

[0395] In some embodiments, the genetically engineered bacterial comprise a native or non-native secretion system described herein for the secretion of an immune modulator, e.g., a cytokine, antibody (e.g., scFv), metabolic enzyme (e.g., kynureninase), and others described herein.

[0396] In some embodiments, the secretion tag is selected from PhoA, OmpF, cvaC, TorA, fdnG, dmsA, PelB, HlyA secretion signal, and HlyA secretion signal. In some embodiments, the secretion tag is the PhoA secretion signal. In some embodiments, the secretion tag comprises a sequence selected from SEQ ID NO: 745 or SEQ ID NO: 746. In some embodiments, the secretion tag is the OmpF secretion signal. In some embodiments, the secretion tag is the OmpF secretion signal. In some embodiments, the secretion tag comprises SEQ ID NO: 747. In some embodiments, the secretion tag is the cvaC secretion signal. In some embodiments, the secretion tag comprises SEQ ID NO: 748. In some embodiments, the secretion tag is the torA secretion signal. In some embodiments, the secretion tag comprises SEQ ID NO: 749. In some embodiments, the secretion tag is the fdnG secretion signal. In some embodiments, the secretion tag comprises SEQ ID NO: 750. In some embodiments, the secretion tag is the dmsA secretion signal. In some embodiments, the secretion tag comprises SEQ ID NO: 751. In some embodiments, the secretion tag is the PelB secretion signal. In some embodiments, the secretion tag comprises SEQ ID NO: 752. In some embodiments, the secretion tag is the HlyA secretion signal. In some embodiments, the secretion tag comprises a sequence selected from SEQ ID NO: 753 and SEQ ID NO: 754.

[0397] In some embodiments, the genetically engineered bacteria encode a polypeptide comprising a secretion tag selected from Adhesin (ECOLIN_19880), DsbA (ECOLIN_21525), GltI (ECOLIN_03430), GspD (ECOLIN_16495), HdeB (ECOLIN_19410), MalE (ECOLIN_22540), OppA (ECOLIN_07295), PelB, PhoA (ECOLIN_02255), PpiA (ECOLIN_18620), TolB, tort, OmpA, PelB, DsbA mglB, and lamB secretion tags. Exemplary sequences of secretion tags are shown in SEQ ID NO: 1222, SEQ ID NO: 1223, SEQ ID NO: 1224, SEQ ID NO: 1225, SEQ ID NO: 1226, SEQ ID NO: 1227, SEQ ID NO: 1228, SEQ ID NO: 1229, SEQ ID NO: 1230, SEQ ID NO: 1141, SEQ ID NO: 1142, SEQ ID NO: 1143, SEQ ID NO: 1144, SEQ ID NO: 1145, SEQ ID NO: 1253, SEQ ID NO: 1157, SEQ ID NO: 1158, SEQ ID NO: 1159, SEQ ID NO: 1160, SEQ ID NO: 1161, SEQ ID NO: 1162, SEQ ID NO: 1163, SEQ ID NO: 1164, SEQ ID NO: 1165, SEQ ID NO: 1166, and SEQ ID NO: 1167.

[0398] In some embodiments, a secretion tag polypeptide sequence may be selected from SEQ ID NO: 1218, SEQ ID NO: 1219, SEQ ID NO: 1181, SEQ ID NO: 1220, SEQ ID NO: 1221, SEQ ID NO: 1180, SEQ ID NO: 1184, SEQ ID NO: 1186, SEQ ID NO: 1190, SEQ ID NO: 1182, SEQ ID NO: 1135, SEQ ID NO: 1183, SEQ ID NO: 1188, SEQ ID NO: 1187, SEQ ID NO: 747, SEQ ID NO: 1185, and SEQ ID NO: 1189.

[0399] Any secretion tag or secretion system can be combined with any immune modulator described herein intended for secretion. In some embodiments, the secretion system is used in combination with one or more genomic mutations, which leads to the leaky or diffusible outer membrane phenotype (DOM), including but not limited to, lpp, nlP, tolA, PAL. In some embodiments, the therapeutic proteins secreted by the genetically engineered bacteria are modified to increase resistance to proteases, e.g. intestinal proteases.

[0400] In some embodiments, the therapeutic polypeptides of interest, e.g., the immune modulators, e.g., immune initiators and/or immune sustainers described herein, are secreted via a diffusible outer membrane (DOM) system. In some embodiments, the therapeutic polypeptide of interest is fused to a N-terminal Sec-dependent secretion signal. Non-limiting examples of such N-terminal Sec-dependent secretion signals include PhoA, OmpF, OmpA, and cvaC. In alternate embodiments, the therapeutic polypeptide of interest is fused to a Tat-dependent secretion signal. Exemplary Tat-dependent tags include TorA, FdnG, and DmsA.

[0401] In certain embodiments, the genetically engineered bacteria comprise deletions or mutations in one or more of the outer membrane and/or periplasmic proteins. Non-limiting examples of such proteins, one or more of which may be deleted or mutated, include lpp, pal, tolA, and/or nlpl. In some embodiments, lpp is deleted or mutated. In some embodiments, pal is deleted or mutated. In some embodiments, tolA is deleted or mutated. In other embodiments, nlpI is deleted or mutated. In yet other embodiments, certain periplasmic proteases are deleted or mutated, e.g., to increase stability of the polypeptide in the periplasm. Non-limiting examples of such proteases include degP and ompT. In some embodiments, degP is deleted or mutated. In some embodiments, ompT is deleted or mutated. In some embodiments, degP and ompT are deleted or mutated.

### Surface Display

[0402] In some embodiments, the genetically engineered bacteria and/or microorganisms encode one or more gene(s) and/or gene cassette(s) encoding a viral antigen, and/or an immune modulator which is anchored or displayed on the surface of the bacteria and/or microorganisms. In some embodiments, a viral spike protein is displayed as a viral antigen on the surface of the bacteria and/or microorganisms. In other embodiments, the receptor binding domain (RBD) of a spike protein, e.g., a RBD of S protein from SARS-CoV-2, is displayed on the surface of the bacteria and/or microorganisms. Additional non-limiting examples of such viral antigens which may be produced by the bacteria of the disclosure include those peptides and/or epitopes described e.g., in Liu W J., et al. 2017, Antiviral Research 137:82-92; Huang J., et al. 2007, Vaccine 25: 6981-6991; Chen H., et al., 2005, J Immunol 175: 591-598; Ahmed S. F., et al., 2020, Viruses 12: 254; and Grifoni A., et al., Cell Host & Microbe 27: 1-10; the contents of each of which is herein incorporated by reference in its entirety or otherwise known in the art.

[0403] Examples of the immune modulators which are displayed or anchored to the bacteria and/or microorganism, are any of the immune modulators described herein, and include but are not limited to antibodies, e.g., scFv fragments, and tissue-specific antigens or neoantigens. In a non-limiting example, the antibodies or scFv fragments which are anchored or displayed on the bacterial cell surface are directed against checkpoint inhibitors described herein, including, but not limited to, CLTLA4, PD-1, PD-L1.

[0404] Suitable systems for surface display of heterologous polypeptides, e.g., effector molecules, on the surface of gram negative and gram positive bacteria are described in International Patent Application PCT/US2017/013072, filed Jan. 11, 2017, published as WO2017/123675, the contents of which is herein incorporated by reference in its entirety

[0405] In some embodiments, the genetically engineered bacteria comprise a gene sequence encoding a therapeutic polypeptide comprising an invasin display tag. In one embodiment, the genetically engineered bacteria comprise a gene sequence encoding a polypeptide comprising SEQ ID NO: 990.

[0406] In some embodiments, the genetically engineered bacteria comprise a gene sequence encoding a therapeutic polypeptide comprising an LppOmpA display tag. In one embodiment, the genetically engineered bacteria comprise a gene sequence encoding a polypeptide comprising SEQ ID NO: 991.

[0407] In some embodiments, the genetically engineered bacteria comprise a gene sequence encoding a therapeutic polypeptide comprising an intimin N display tag. In one embodiment, the genetically engineered bacteria comprise a gene sequence encoding a polypeptide comprising SEQ ID NO: 992. In some embodiments, the genetically engineered bacteria comprise a display anchor which is at least about 80%, at least about 85%, at least about 90%, at least about 95%, or at least about 99% homologous to a sequence selected from SEQ ID NO: 990, SEQ ID NO: 991, and SEQ ID NO: 992. In another embodiment, the genetically engineered bacteria comprise a gene sequence encoding display anchor comprising a sequence selected from SEQ ID NO: 990, SEQ ID NO: 991, and SEQ ID NO: 992. In yet another embodiment, the display anchor expressed by the genetically engineered bacteria consists of a sequence selected from SEQ ID NO: 990, SEQ ID NO: 991, and SEQ ID NO: 992.

[0408] In some embodiments, one or more ScFvs are displayed on the bacterial cell surface, alone or in combination with other therapeutic polypeptides of interest.

[0409] In some embodiments, a cell surface display strategy or circuit is combined with a secretion strategy or circuit in one bacterium. In some embodiments, the same polypeptide is both displayed and secreted. In some embodiments, a first polypeptide is displayed and a second is secreted. In some embodiments, a display strategy or circuit strategy is combined with a circuit for the intracellular production of an enzyme and consequentially intracellular catabolism of its substrate. In some embodiments, a display strategy or display circuit is combined with a circuit for the intracellular production of a gut barrier enhancer molecule and/or an anti-inflammatory effector molecule.

[0410] In some embodiments, the expression of the surface displayed polypeptide or fusion protein is driven by an inducible promoter. In alternate embodiments, expression of the surface displayed polypeptides or polypeptide fusion proteins is driven by a constitutive promoter.

[0411] In some embodiments, the expression of the surface displayed polypeptide or fusion protein is plasmid based. In some embodiments, the gene sequence(s) encoding the antibodies or scFv fragments for surface display is chromosomally inserted.

### Essential Genes, Auxotrophs, Kill Switches, and Host-Plasmid Dependency

[0412] As used herein, the term “essential gene” refers to a gene that is necessary to for cell growth and/or survival. Bacterial essential genes are well known to one of ordinary skill in the art, and can be identified by directed deletion of genes and/or random mutagenesis and screening (see, for example, Zhang and Lin, 2009, DEG 5.0, a database of essential genes in both prokaryotes and eukaryotes, Nucl. Acids Res., 37:D455-D458 and Gerdes et al., Essential genes on metabolic maps, Curr. Opin. Biotechnol., 17(5):448-456, the entire contents of each of which are expressly incorporated herein by reference).

[0413] An “essential gene” may be dependent on the circumstances and environment in which an organism lives. For example, a mutation of, modification of, or excision of an essential gene may result in the recombinant bacteria of the disclosure becoming an auxotroph. An auxotrophic modification is intended to cause bacteria to die in the absence of an exogenously added nutrient essential for survival or growth because they lack the gene(s) necessary to produce that essential nutrient.

[0414] An auxotrophic modification is intended to cause bacteria to die in the absence of an exogenously added nutrient essential for survival or growth because they lack the gene(s) necessary to produce that essential nutrient. In some embodiments, any of the genetically engineered bacteria described herein also comprise a deletion or mutation in a gene required for cell survival and/or growth. In one embodiment, the essential gene is a DNA synthesis gene, for example, thyA. In another embodiment, the essential gene is a bacterial cell wall synthesis gene, for example, dapA. In yet another embodiment, the essential gene is an amino acid gene, for example, serA or metA. Any gene required for cell survival and/or growth may be targeted, including but not limited to, cysE, gInA, ilvD, leuB, lysA, serA, metA, glyA, hisB, ilvA, pheA, proA, thrC, trpC, tyrA, thyA, uraA, dapA, dapB, dapD, dapE, dapF, flhD, metB, metC, proAB, and thi1, as long as the corresponding wild-type gene product is not produced in the bacteria. Exemplary bacterial genes which may be disrupted or deleted to produce an auxotrophic strain as described in International Patent Application PCT/US2017/013072, filed Jan. 11, 2017, published as WO2017/123675, the contents of which is herein incorporated by reference in its entirety. These include, but are not limited to, genes required for oligonucleotide synthesis, amino acid synthesis, and cell wall synthesis. Table 12 lists exemplary bacterial genes which may be disrupted or deleted to produce an auxotrophic strain. These include, but are not limited to, genes required for oligonucleotide synthesis, amino acid synthesis, and cell wall synthesis.

TABLE 12
Non-limiting Examples of Bacterial Genes
Useful for Generation of an Auxotroph

| Amino Acid | Oligonucleotide | Cell Wall |
|---|---|---|
| cysE | thyA | dapA |
| glnA | uraA | dapB |
| ilvD | | dapD |
| leuB | | dapE |
| lysA | | dapF |
| serA | | |
| metA | | |
| glyA | | |
| hisB | | |
| ilvA | | |
| pheA | | |
| proA | | |
| thrC | | |
| trpC | | |
| tyrA | | |

[0415] Auxotrophic mutations are useful in some instances in which biocontainment strategies may be required to prevent unintended proliferation of the genetically engineered bacterium in a natural ecosystem. Any auxotrophic mutation in an essential gene described above or known in the art can be useful for this purpose, e.g. DNA synthesis genes, amino acid synthesis genes, or genes for the synthesis of cell wall. Accordingly, in some embodiments, the genetically engineered bacteria comprise modifications, e.g., mutation(s) or deletion(s) in one or more auxotrophic genes, e.g., to prevent growth and proliferation of the bacterium in the natural environment. In some embodiments, the modification may be located in a non-coding region. In some embodiments, the modifications result in attenuation of transcription or translation. In some embodiments, the modifications, e.g., mutations or deletions, result in reduced or no transcription or reduced or no translation of the essential gene. In some embodiments, the modifications, e.g., mutations or deletions, result in transcription and/or translation of a non-functional version of the essential gene. In some embodiments, the modifications, e.g., mutations or deletions result in in truncated transcription or translation of the essential gene, resulting in a truncated polypeptide. In some embodiments, the modification, e.g., mutation is located within the coding region of the gene.

[0416] While unable to grow in the natural ecosystem, certain auxotrophic mutations may allow growth and proliferation in the mammalian host administered the bacteria. For example, an essential pathway that is rendered non-functional by the auxotrophic mutation may be complemented by production of the metabolite by the host. As a result, the bacterium administered to the host can take up the metabolite from the environment and can proliferate and colonize the target site. Thus, in some embodiments, the auxotrophic gene is an essential gene for the production of a metabolite, which is also produced by the mammalian host in vivo. In some embodiments, metabolite production by the host may allow uptake of the metabolite by the bacterium and permit survival and/or proliferation of the bacterium within the target site. In some embodiments, bacteria comprising such auxotrophic mutations are capable of proliferating and colonizing the target site to the same extent as a bacterium of the same subtype which does not carry the auxotrophic mutation.

[0417] In some embodiments, the bacteria are capable of colonizing and proliferating in the target microenvironment. In some embodiments, the target colonizing bacteria comprise one or more auxotrophic mutations. In some embodiments, the target colonizing bacteria do not comprise one or more auxotrophic modifications or mutations. In a non-limiting example, greater numbers of bacteria are detected after 24 hours and 72 hours than were originally injected into the subject. In some embodiments, CFUs detected 24 hours post injection are at least about 1 to 2 logs greater than administered. In some embodiments, CFUs detected 24 hours post injection are at least about 2 to 3 logs greater than administered. In some embodiments, CFUs detected 24 hours post injection are at least about 3 to 4 logs greater than administered. In some embodiments, CFUs detected 24 hours post injection are at least about 4 to 5 logs greater than administered. In some embodiments, CFUs detected 24 hours post injection are at least about 5 to 6 logs greater than administered. In some embodiments, CFUs detected 72 hours post injection are at least about 1 to 2 logs greater than administered. In some embodiments, CFUs detected 72 hours post injection are at least about 2 to 3 logs greater than administered. In some embodiments, CFUs detected 72 hours post injection are at least about 3 to 4 logs greater than administered. In some embodiments, CFUs detected 72 hours post injection are at least about 4 to 5 logs greater than administered. In some embodiments, CFUs detected 72 hours post injection are at least about 5 to 6 logs greater than administered. In some embodiments, CFUs can be measured at later time points, such as after at least one week, after at least 2 or more weeks, after at least one month, after at least two or more months post injection.

[0418] Non-limiting examples of such auxotrophic genes, which allow proliferation and colonization of the target, are thyA and uraA, as shown herein. Accordingly, in some embodiments, the genetically engineered bacteria of the disclosure may comprise an auxotrophic modification, e.g., mutation or deletion, in the thyA gene. In some embodiments, the genetically engineered bacteria of the disclosure may comprise an auxotrophic modification, e.g., mutation or deletion, in the uraA gene. In some embodiments, the genetically engineered bacteria of the disclosure may comprise auxotrophic modification, e.g., mutation or deletion, in the thyA gene and the uraA gene.

[0419] Alternatively, the auxotrophic gene is an essential gene for the production of a metabolite which cannot be produced by the host within the target, i.e., the auxotrophic mutation is not complemented by production of the metabolite by the host within the target microenvironment. As a result, the this mutation may affect the ability of the bacteria to grow and colonize the target and bacterial counts decrease over time. This type of auxotrophic mutation can be useful for the modulation of in vivo activity of the immune modulator or duration of activity of the immune modulator, e.g., within a target. An example of this method of fine-tuning levels and timing of immune modulator release is described herein using a auxotrophic modification, e.g., mutation, in dapA. Diaminopimelic acid (Dap) is a characteristic component of certain bacterial cell walls, e.g., of gram negative bacteria. Without diaminopimelic acid, bacteria are unable to form proteoglycan, and as such are unable to grow. DapA is not produced by mammalian cells, and therefore no alternate source of DapA is provided in the target. As such, a dapA auxotrophy may present a particularly useful strategy to modulate and fine tune timing and extent of bacterial presence in the target and/or levels and timing of immune modulator expression and production. Accordingly, in some embodiments, the genetically engineered bacteria of the disclosure comprise an mutation in an essential gene for the production of a metabolite which cannot be produced by the host within the target. In some embodiments, the auxotrophic mutation is in a gene which is essential for the production and maintenance of the bacterial cell wall known in the art or described herein, or a mutation in a gene that is essential to another structure that is unique to bacteria and not present in mammalian cells. In some embodiments, bacteria comprising such auxotrophic mutations are capable of proliferating and colonizing the target to a substantially lesser extent than a bacterium of the same subtype which does not carry the auxotrophic mutation. Control of bacterial growth (and by extent effector levels) may be further combined with other regulatory strategies, including but not limited to, metabolite or chemically inducible promoters described herein.

[0420] In a non-limiting example, lower numbers of bacteria are detected after 24 hours and 72 hours than were originally injected into the subject. In some embodiments, CFUs detected 24 hours post injection are at least about 1 to 2 logs lower than administered. In some embodiments, CFUs detected 24 hours post injection are at least about 2 to 3 logs lower than administered. In some embodiments, CFUs detected 24 hours post injection are at least about 3 to 4 logs lower than administered. In some embodiments, CFUs detected 24 hours post injection are at least about 4 to 5 logs lower than administered. In some embodiments, CFUs detected 24 hours post injection are at least about 5 to 6 logs lower than administered. In some embodiments, CFUs detected 72 hours post injection are at least about 1 to 2 logs lower than administered. In some embodiments, CFUs detected 72 hours post injection are at least about 2 to 3 logs lower than administered. In some embodiments, CFUs detected 72 hours post injection are at least about 3 to 4 logs lower than administered. In some embodiments, CFUs detected 72 hours post injection are at least about 4 to 5 logs lower than administered. In some embodiments, CFUs detected 72 hours post injection are at least about 5 to 6 logs lower than administered. In some embodiments, CFUs can be measured at later time points, such as after at least one week, after at least 2 or more weeks, after at least one month, after at least two or more months post injection.

[0421] In some embodiments, the genetically engineered bacteria of the disclosure comprise a auxotrophic modification, e.g., mutation, in dapA. A non-limiting example described herein is a genetically engineered bacterium comprising gene sequences encoding dacA for c-di-AMP production. Production of the STING agonist can be temporally regulated or restricted through the introduction of a dapA auxotrophy. In some embodiments, the dapA auxotrophy provides a means for tunable STING agonist production.

[0422] Auxotrophic modifications may also be used to screen for mutant bacteria that produce the effector molecule for various applications. In one example, the auxotrophy is useful to monitor purity or “sterility” of batches in small and large scale production of a bacterial strain. In this case, the auxotrophy presents a means to distinguish the engineered bacterium from a potential contaminant. In a non-limiting example, during the manufacturing process of the live biotherapeutic (i.e., large scale), an auxotrophy can be a useful tool to demonstrate purity or “sterility” of the drug substance. This method to determine purity of the culture is particularly useful in the absence of an antibiotic resistance gene, which is often used for this purpose in experimental strains, but which may be removed during the development of the live therapeutic drug product.

[0423] trpE is another auxotrophic mutation described herein. Bacteria carrying this mutation cannot produce tryptophan. Genetically engineered bacteria described herein with a trpE mutation further comprise kynureninase. Kynureninase allows the bacterium to convert kynurenine into the tryptophan precursor anthranilate and therefore the bacterium can grow in the absence of tryptophan if kynurenine is present.

[0424] In some embodiments, the genetically engineered bacteria comprise auxotrophic mutation(s) in one essential gene. In some embodiments, the genetically engineered bacteria comprise auxotrophic mutation(s) in two essential genes (double auxotrophy). In some embodiments, the genetically engineered bacteria comprise auxotrophic mutation(s) in three or more essential gene(s).

[0425] In some embodiments, the genetically engineered bacteria comprise auxotrophic mutation(s) in dapA and thyA. In some embodiments, the genetically engineered bacteria comprise auxotrophic mutation(s) in dapA and uraA. In some embodiments, the genetically engineered bacteria comprise auxotrophic mutation(s) in thyA and uraA. In some embodiments, the genetically engineered bacteria comprise auxotrophic mutation(s) in dapA, thyA and uraA.

[0426] In some embodiments, the genetically engineered bacteria comprise auxotrophic mutation(s) in trpE. In some embodiments, the genetically engineered bacteria comprise auxotrophic mutation(s) in trpE and thyA. In some embodiments, the genetically engineered bacteria comprise auxotrophic mutation(s) in trpE and dapA. In some embodiments, the genetically engineered bacteria comprise auxotrophic mutation(s) in trpE and uraA. In some embodiments, the genetically engineered bacteria comprise auxotrophic mutation(s) in trpE, dapA and thyA. In some embodiments, the genetically engineered bacteria comprise auxotrophic mutation(s) in trpE, dapA and uraA. In some embodiments, the genetically engineered bacteria comprise auxotrophic mutation(s) in trpE, thyA and uraA. In some embodiments, the genetically engineered bacteria comprise auxotrophic mutation(s) in trpE, dapA, thyA and uraA.

[0427] In another non-limiting example, a conditional auxotroph can be generated. The chromosomal copy of dapA or thyA is knocked out. Another copy of thyA or dapA is introduced, e.g., under control of a low oxygen promoter. Under anaerobic conditions, dapA or thyA—as the case may be—are expressed, and the strain can grow in the absence of dap or thymidine. Under aerobic conditions, dapA or thyA expression is shut off, and the strain cannot grow in the absence of dap or thymidine. Such a strategy can also be employed to allow survival of bacteria under anaerobic conditions, e.g., the gut or conditions of the target microenvironment, but prevent survival under aerobic conditions.

[0428] In some embodiments, the genetically engineered bacterium of the present disclosure is a synthetic ligand-dependent essential gene (SLiDE) bacterial cell. SLiDE bacterial cells are synthetic auxotrophs with a mutation in one or more essential genes that only grow in the presence of a particular ligand (see Lopez and Anderson “Synthetic Auxotrophs with Ligand-Dependent Essential Genes for a BL21 (DE3 Biosafety Strain,” ACS Synthetic Biology (2015) DOI: 10.1021/acssynbio.5b00085, the entire contents of which are expressly incorporated herein by reference). SLiDE bacterial cells are described in International Patent Application PCT/US2017/013072, filed Jan. 11, 2017, published as WO2017/123675, the contents of which is herein incorporated by reference in its entirety.

[0429] In some embodiments, the genetically engineered bacteria of the invention also comprise a kill switch. Suitable kill switches are described in International Patent Application PCT/US2016/39427, filed Jun. 24, 2016, published as WO2016/210373, the contents of which are herein incorporated by reference in their entirety. The kill switch is intended to actively kill engineered microbes in response to external stimuli. As opposed to an auxotrophic mutation where bacteria die because they lack an essential nutrient for survival, the kill switch is triggered by a particular factor in the environment that induces the production of toxic molecules within the microbe that cause cell death.

In some embodiments, the genetically engineered bacteria of the invention also comprise a plasmid that has been modified to create a host-plasmid mutual dependency. In certain embodiments, the mutually dependent host-plasmid platform is as described in Wright et al., 2015. These and other systems and platforms are described in International Patent Application PCT/US2017/013072, filed Jan. 11, 2017, published as WO2017/123675, the contents of which is herein incorporated by reference in its entirety.

### Genetic Regulatory Circuits

[0430] In some embodiments, the genetically engineered bacteria comprise multi-layered genetic regulatory circuits for expressing the constructs described herein. Suitable multi-layered genetic regulatory circuits are described in International Patent Application PCT/US2016/39434, filed on Jun. 24, 2016, published as WO2016/210378, the contents of which is herein incorporated by reference in its entirety. The genetic regulatory circuits are useful to screen for mutant bacteria that produce an immune modulator or rescue an auxotroph. In certain embodiments, the invention provides methods for selecting genetically engineered bacteria that produce one or more genes of interest.

### Pharmaceutical Compositions and Formulations

[0431] Pharmaceutical compositions comprising the genetically engineered microorganisms of the invention may be used to treat, manage, ameliorate, and/or prevent viral infection, e.g., the coronavirus disease 2019 (COVID-19). Pharmaceutical compositions of the invention comprising one or more genetically engineered bacteria, alone or in combination with prophylactic agents, therapeutic agents, and/or pharmaceutically acceptable carriers are provided.

[0432] In certain embodiments, the pharmaceutical composition comprises one species, strain, or subtype of bacteria that are engineered to comprise the genetic modifications described herein, e.g., one or more genes encoding one or more viral antigen, e.g., a spike protein of SARS-CoV-2, and one or more effectors, e.g., immune modulators. In alternate embodiments, the pharmaceutical composition comprises two or more species, strains, and/or subtypes of bacteria that are each engineered to comprise the genetic modifications described herein, e.g., one or more genes encoding one or more effectors, e.g., immune modulators.

[0433] In some embodiments, the genetically engineered bacteria are administered systemically. In some embodiments, the genetically engineered bacteria are administered intranasally. The pharmaceutical compositions of the invention may be formulated in a conventional manner using one or more physiologically acceptable carriers comprising excipients and auxiliaries, which facilitate processing of the active ingredients into compositions for pharmaceutical use. Methods of formulating pharmaceutical compositions are known in the art (see, e.g., “Remington's Pharmaceutical Sciences,” Mack Publishing Co., Easton, Pa.). In some embodiments, the pharmaceutical compositions are subjected to tableting, lyophilizing, direct compression, conventional mixing, dissolving, granulating, levigating, emulsifying, encapsulating, entrapping, or spray drying to form tablets, granulates, nanoparticles, nanocapsules, microcapsules, microtablets, pellets, or powders, which may be enterically coated or uncoated. Appropriate formulation depends on the route of administration.

[0434] The genetically engineered microorganisms may be formulated into pharmaceutical compositions in any suitable dosage form (e.g., liquids, capsules, sachet, hard capsules, soft capsules, tablets, enteric coated tablets, suspension powders, granules, or matrix sustained release formations for oral administration) and for any suitable type of administration (e.g., oral, topical, injectable, intravenous, sub-cutaneous, intranasal, intratumoral, peritumor, immediate-release, pulsatile-release, delayed-release, or sustained release). Suitable dosage amounts for the genetically engineered bacteria may range from about 10⁴ to 10¹² bacteria. The composition may be administered once or more daily, weekly, or monthly. The composition may be administered before, during, or following a meal. In one embodiment, the pharmaceutical composition is administered before the subject eats a meal. In one embodiment, the pharmaceutical composition is administered currently with a meal. In on embodiment, the pharmaceutical composition is administered after the subject eats a meal.

[0435] The genetically engineered bacteria may be formulated into pharmaceutical compositions comprising one or more pharmaceutically acceptable carriers, thickeners, diluents, buffers, buffering agents, surface active agents, neutral or cationic lipids, lipid complexes, liposomes, penetration enhancers, carrier compounds, and other pharmaceutically acceptable carriers or agents. For example, the pharmaceutical composition may include, but is not limited to, the addition of calcium bicarbonate, sodium bicarbonate, calcium phosphate, various sugars and types of starch, cellulose derivatives, gelatin, vegetable oils, polyethylene glycols, and surfactants, including, for example, polysorbate 20. In some embodiments, the genetically engineered bacteria of the invention may be formulated in a solution of sodium bicarbonate, e.g., 1 molar solution of sodium bicarbonate (to buffer an acidic cellular environment, such as the stomach, for example). The genetically engineered bacteria may be administered and formulated as neutral or salt forms. Pharmaceutically acceptable salts include those formed with anions such as those derived from hydrochloric, phosphoric, acetic, oxalic, tartaric acids, etc., and those formed with cations such as those derived from sodium, potassium, ammonium, calcium, ferric hydroxides, isopropylamine, triethylamine, 2-ethylamino ethanol, histidine, procaine, etc.

[0436] The genetically engineered microorganisms may be administered intravenously, e.g., by infusion or injection. In other embodiments, the genetically engineered microorganisms may be administered intra-arterially, intramuscularly, or intraperitoneally. In some embodiments, the genetically engineered bacteria colonize about 20%, 30%, 40%, 50%, 60%, 70%, 80%, 90% or more of the target.

[0437] The genetically engineered microorganisms of the disclosure may be administered via intranasal delivery, resulting in bacteria or virus that is directly deposited within the target site. Intranasal delivery of the engineered bacteria or virus may elicit a potent localized inflammatory response as well as an adaptive immune response against the target cells. Bacteria or virus are suspended in solution before being withdrawn into a 1-ml syringe.

[0438] Single insertion points or multiple insertion points can be used in percutaneous injection protocols. Using a single insertion point, the solution may be injected percutaneously along multiple tracks, as far as the radial reach of the needle allows. In other embodiments, multiple injection points may be used if the target is larger than the radial reach of the needle. The needle can be pulled back without exiting, and redirected as often as necessary until the full dose is injected and dispersed. To maintain sterility, a separate needle is used for each injection. Needle size and length varies depending on the tissue type.

[0439] In some embodiments, the target site is injected percutaneously with an 18-gauge multipronged needle (Quadra-Fuse, Rex Medical). The device consists of an 18 gauge puncture needle 20 cm in length. The needle has three retractable prongs, each with four terminal side holes and a connector with extension tubing clamp. The prongs are deployed from the lateral wall of the needle. The needle can be introduced percutaneously into the center of the target and can be positioned at the deepest margin of the target. The prongs are deployed to the margins of the target. The prongs are deployed at maximum length and then are retracted at defined intervals. Optionally, one or more rotation-injection-rotation maneuvers can be performed, in which the prongs are retracted, the needle is rotated by a 60 degrees, which is followed by repeat deployment of the prongs and additional injection.

[0440] In some embodiments, bacteria, e.g., E. coli Nissle, or spores, e.g., Clostridium novyi NT, are dissolved in sterile phosphate buffered saline (PBS) for systemic injection.

[0441] In some embodiments, the treatment regimen will include one or more intranasal administrations. In some embodiments, a treatment regimen will include an initial dose, which followed by at least one subsequent dose. One or more doses can be administered sequentially in two or more cycles.

[0442] For example, a first dose may be administered at day 1, and a second dose may be administered after 1, 2, 3, 4, 5, 6, days or 1, 2, 3, or 4 weeks or after a longer interval. Additional doses may be administered after 1, 2, 3, 4, 5, 6, days or after 1, 2, 3, or 4 weeks or longer intervals. In some embodiments, the first and subsequent administrations have the same dosage. In other embodiments, different doses are administered. In some embodiments, more than one dose is administered per day, for example, two, three or more doses can be administered per day.

[0443] The routes of administration and dosages described are intended only as a guide. The optimum route of administration and dosage can be readily determined by a skilled practitioner. The dosage may be determined according to various parameters, especially according to the location of the target, the size of the target, the age, weight and condition of the patient to be treated and the route and method of administration.

[0444] In one embodiment, Clostridium spores are delivered systemically. In another embodiment, Clostridium spores are delivered via intranasal delivery. In one embodiment, E. coli Nissle are delivered via intranasal delivery. In other embodiments, E. coli Nissle is administered via intravenous injection or orally, as described in a mouse model in for example in Danino et al. 2015, or Stritzker et al., 2007, the contents of which is herein incorporated by reference in its entirety. E. coli Nissle mutations to reduce toxicity include but are not limited to msbB mutants resulting in non-myristoylated LPS and reduced endotoxin activity, as described in Stritzker et al., 2010 (Stritzker et al, Bioengineered Bugs 1:2, 139-145; Myristylation negative msbB-mutants of probiotic E. coli Nissle 1917 retain tissue specific colonization properties but show less side effects in immunocompetent mice.

[0445] For intravenous injection a preferred dose of bacteria is the dose in which the greatest number of bacteria is found in the target tissue and the lowest amount found in other tissues. In mice, Stritzker et al (International Journal of Medical Microbiology 297 (2007) 151-162; Tissue specific colonization, tissue distribution, and gene induction by Escherichia coli Nissle 1917 in live mice) found that the lowest number of bacteria needed for successful target colonization was 2e4 CFU, in which half of the mice showed target colonization. Injection of 2e5 and 2e6 CFU resulted in colonization of all targets, and numbers of bacteria in the targets increased. However, at higher concentrations, bacterial counts became detectable in the liver and the spleen.

[0446] In some embodiments, the microorganisms of the disclosure may be administered orally. In one embodiment, the genetically engineered microorganism is delivered intranasally. In one embodiment, the genetically engineered microorganisms is delivered intrapleurally. In one embodiment, the genetically engineered microorganism is delivered subcutaneously. In one embodiment, the genetically engineered microorganism is delivered intravenously. In one embodiment, the genetically engineered microorganism is delivered intrapleurally.

[0447] In some embodiments, the genetically engineered microorganisms of the invention may be administered intranasally according to a regimen which requires multiple injections. In some embodiments, the same bacterial strains are administered in each injection. In some embodiments, a first strain is injected first and a second strain is injected at a later timepoint. For example, a strain capable of producing an immune initiator, e.g., STING agonist, may be administered concurrently or sequentially with a strain capable of producing another immune initiator, e.g., a co-stimulatory molecule, e.g., agonistic anti-OX40, 41BB, or GITR. Additional injections of the two immune initiators, either concurrently or sequentially, can follow. In another example, a strain capable of producing an immune initiator, e.g., STING agonist, may be administered first, and a strain capable of producing an immune sustainer, e.g., kynurenine consumption, or anti-PD-1/anti-PD-L1 secretion or anti-PD-1/anti-PD-L1 surface display, may be administered second. Additional injections of STING agonist producing strains and/or anti-PD-1/anti-PD-L1 producing strains can follow. Optionally, antibiotics can be used to clear a first strain from the target before injection of a second strain. Alternatively, an auxotrophic modification, e.g., mutation in the dapA gene, which limits colonization, can be incorporated into the first strain, which may eliminate the bacteria of the first strain prior to injection of a second strain.

[0448] The genetically engineered microorganisms disclosed herein may be administered topically and formulated in the form of an ointment, cream, transdermal patch, lotion, gel, shampoo, spray, aerosol, solution, emulsion, or other form well known to one of skill in the art. See, e.g., “Remington's Pharmaceutical Sciences,” Mack Publishing Co., Easton, Pa. In an embodiment, for non-sprayable topical dosage forms, viscous to semi-solid or solid forms comprising a carrier or one or more excipients compatible with topical application and having a dynamic viscosity greater than water are employed. Suitable formulations include, but are not limited to, solutions, suspensions, emulsions, creams, ointments, powders, liniments, salves, etc., which may be sterilized or mixed with auxiliary agents (e.g., preservatives, stabilizers, wetting agents, buffers, or salts) for influencing various properties, e.g., osmotic pressure. Other suitable topical dosage forms include sprayable aerosol preparations wherein the active ingredient in combination with a solid or liquid inert carrier, is packaged in a mixture with a pressurized volatile (e.g., a gaseous propellant, such as freon) or in a squeeze bottle. Moisturizers or humectants can also be added to pharmaceutical compositions and dosage forms. Examples of such additional ingredients are well known in the art. In one embodiment, the pharmaceutical composition comprising the recombinant bacteria of the invention may be formulated as a hygiene product. For example, the hygiene product may be an antibacterial formulation, or a fermentation product such as a fermentation broth. Hygiene products may be, for example, shampoos, conditioners, creams, pastes, lotions, and lip balms.

[0449] The genetically engineered microorganisms disclosed herein may be administered orally and formulated as tablets, pills, dragees, capsules, liquids, gels, syrups, slurries, suspensions, etc. Pharmacological compositions for oral use can be made using a solid excipient, optionally grinding the resulting mixture, and processing the mixture of granules, after adding suitable auxiliaries if desired, to obtain tablets or dragee cores. Suitable excipients include, but are not limited to, fillers such as sugars, including lactose, sucrose, mannitol, or sorbitol; cellulose compositions such as maize starch, wheat starch, rice starch, potato starch, gelatin, gum tragacanth, methyl cellulose, hydroxypropylmethylcellulose, sodium carbomethylcellulose; and/or physiologically acceptable polymers such as polyvinylpyrrolidone (PVP) or polyethylene glycol (PEG). Disintegrating agents may also be added, such as cross-linked polyvinylpyrrolidone, agar, alginic acid or a salt thereof such as sodium alginate.

[0450] Tablets or capsules can be prepared by conventional means with pharmaceutically acceptable excipients such as binding agents (e.g., pregelatinized maize starch, polyvinylpyrrolidone, hydroxypropyl methylcellulose, carboxymethylcellulose, polyethylene glycol, sucrose, glucose, sorbitol, starch, gum, kaolin, and tragacanth); fillers (e.g., lactose, microcrystalline cellulose, or calcium hydrogen phosphate); lubricants (e.g., calcium, aluminum, zinc, stearic acid, polyethylene glycol, sodium lauryl sulfate, starch, sodium benzoate, L-leucine, magnesium stearate, talc, or silica); disintegrants (e.g., starch, potato starch, sodium starch glycolate, sugars, cellulose derivatives, silica powders); or wetting agents (e.g., sodium lauryl sulphate). The tablets may be coated by methods well known in the art. A coating shell may be present, and common membranes include, but are not limited to, polylactide, polyglycolic acid, polyanhydride, other biodegradable polymers, alginate-polylysine-alginate (APA), alginate-polymethylene-co-guanidine-alginate (A-PMCG-A), hydroymethylacrylate-methyl methacrylate (HEMA-MMA), multilayered HEMA-MMA-MAA, polyacrylonitrilevinylchloride (PAN-PVC), acrylonitrile/sodium methallylsulfonate (AN-69), polyethylene glycol/poly pentamethylcyclopentasiloxane/polydimethylsiloxane (PEG/PD5/PDMS), poly N,N-dimethyl acrylamide (PDMAAm), siliceous encapsulates, cellulose sulphate/sodium alginate/polymethylene-co-guanidine (CS/A/PMCG), cellulose acetate phthalate, calcium alginate, k-carrageenan-locust bean gum gel beads, gellan-xanthan beads, poly(lactide-co-glycolides), carrageenan, starch poly-anhydrides, starch polymethacrylates, polyamino acids, and enteric coating polymers.

[0451] In some embodiments, the genetically engineered bacteria are enterically coated for release into the gut or a particular region of the gut, for example, the large intestine. The typical pH profile from the stomach to the colon is about 1-4 (stomach), 5.5-6 (duodenum), 7.3-8.0 (ileum), and 5.5-6.5 (colon). In some diseases, the pH profile may be modified. In some embodiments, the coating is degraded in specific pH environments in order to specify the site of release. In some embodiments, at least two coatings are used. In some embodiments, the outside coating and the inside coating are degraded at different pH levels.

[0452] In some embodiments, enteric coating materials may be used, in one or more coating layers (e.g., outer, inner and/o intermediate coating layers). Enteric coated polymers remain unionized at low pH, and therefore remain insoluble. But as the pH increases in the gastrointestinal tract, the acidic functional groups are capable of ionization, and the polymer swells or becomes soluble in the intestinal fluid.

[0453] Materials used for enteric coatings include Cellulose acetate phthalate (CAP), Poly(methacrylic acid-co-methyl methacrylate), Cellulose acetate trimellitate (CAT), Poly(vinyl acetate phthalate) (PVAP) and Hydroxypropyl methylcellulose phthalate (HPMCP), fatty acids, waxes, Shellac (esters of aleurtic acid), plastics and plant fibers. Additionally, Zein, Aqua-Zein (an aqueous zein formulation containing no alcohol), amylose starch and starch derivatives, and dextrins (e.g., maltodextrin) are also used. Other known enteric coatings include ethylcellulose, methylcellulose, hydroxypropyl methylcellulose, amylose acetate phthalate, cellulose acetate phthalate, hydroxyl propyl methyl cellulose phthalate, an ethylacrylate, and a methylmethacrylate.

[0454] Coating polymers also may comprise one or more of, phthalate derivatives, CAT, HPMCAS, polyacrylic acid derivatives, copolymers comprising acrylic acid and at least one acrylic acid ester, Eudragit™ S (poly(methacrylic acid, methyl methacrylate)1:2); Eudragit L100™ S (poly(methacrylic acid, methyl methacrylate)1:1); Eudragit L30D™, (poly(methacrylic acid, ethyl acrylate)1:1); and (Eudragit L100-55) (poly(methacrylic acid, ethyl acrylate)1:1) (Eudragit™ L is an anionic polymer synthesized from methacrylic acid and methacrylic acid methyl ester), polymethyl methacrylate blended with acrylic acid and acrylic ester copolymers, alginic acid, ammonia alginate, sodium, potassium, magnesium or calcium alginate, vinyl acetate copolymers, polyvinyl acetate 30D (30% dispersion in water), a neutral methacrylic ester comprising poly(dimethylaminoethylacrylate) (“Eudragit E™), a copolymer of methylmethacrylate and ethylacrylate with trimethylammonioethyl methacrylate chloride, a copolymer of methylmethacrylate and ethylacrylate, Zein, shellac, gums, or polysaccharides, or a combination thereof.

[0455] Coating layers may also include polymers which contain Hydroxypropylmethylcellulose (HPMC), Hydroxypropylethylcellulose (HPEC), Hydroxypropylcellulose (HPC), hydroxypropylethylcellulose (HPEC), hydroxymethylpropylcellulose (HMPC), ethylhydroxyethylcellulose (EHEC) (Ethulose), hydroxyethylmethylcellulose (HEMC), hydroxymethylethylcellulose (HMEC), propylhydroxyethylcellulose (PHEC), methylhydroxyethylcellulose (M H EC), hydrophobically modified hydroxyethylcellulose (NEXTON), carboxymethyl hydroxyethylcellulose (CMHEC), Methylcellulose, Ethylcellulose, water soluble vinyl acetate copolymers, gums, polysaccharides such as alginic acid and alginates such as ammonia alginate, sodium alginate, potassium alginate, acid phthalate of carbohydrates, amylose acetate phthalate, cellulose acetate phthalate (CAP), cellulose ester phthalates, cellulose ether phthalates, hydroxypropylcellulose phthalate (HPCP), hydroxypropylethylcellulose phthalate (HPECP), hydroxyproplymethylcellulose phthalate (HPMCP), hydroxyproplymethylcellulose acetate succinate (HPMCAS).

[0456] In some embodiments, the genetically engineered microorganisms are enterically coated for release into the gut or a particular region of the gut, for example, the large intestine. The typical pH profile from the stomach to the colon is about 1-4 (stomach), 5.5-6 (duodenum), 7.3-8.0 (ileum), and 5.5-6.5 (colon). In some diseases, the pH profile may be modified. In some embodiments, the coating is degraded in specific pH environments in order to specify the site of release. In some embodiments, at least two coatings are used. In some embodiments, the outside coating and the inside coating are degraded at different pH levels.

[0457] Liquid preparations for oral administration may take the form of solutions, syrups, suspensions, or a dry product for constitution with water or other suitable vehicle before use. Such liquid preparations may be prepared by conventional means with pharmaceutically acceptable agents such as suspending agents (e.g., sorbitol syrup, cellulose derivatives, or hydrogenated edible fats); emulsifying agents (e.g., lecithin or acacia); non-aqueous vehicles (e.g., almond oil, oily esters, ethyl alcohol, or fractionated vegetable oils); and preservatives (e.g., methyl or propyl-p-hydroxybenzoates or sorbic acid). The preparations may also contain buffer salts, flavoring, coloring, and sweetening agents as appropriate. Preparations for oral administration may be suitably formulated for slow release, controlled release, or sustained release of the genetically engineered microorganisms described herein.

[0458] In one embodiment, the genetically engineered microorganisms of the disclosure may be formulated in a composition suitable for administration to pediatric subjects. As is well known in the art, children differ from adults in many aspects, including different rates of gastric emptying, pH, gastrointestinal permeability, etc. (Ivanovska et al., Pediatrics, 134(2):361-372, 2014). Moreover, pediatric formulation acceptability and preferences, such as route of administration and taste attributes, are critical for achieving acceptable pediatric compliance. Thus, in one embodiment, the composition suitable for administration to pediatric subjects may include easy-to-swallow or dissolvable dosage forms, or more palatable compositions, such as compositions with added flavors, sweeteners, or taste blockers. In one embodiment, a composition suitable for administration to pediatric subjects may also be suitable for administration to adults.

[0459] In one embodiment, the composition suitable for administration to pediatric subjects may include a solution, syrup, suspension, elixir, powder for reconstitution as suspension or solution, dispersible/effervescent tablet, chewable tablet, gummy candy, lollipop, freezer pop, troche, chewing gum, oral thin strip, orally disintegrating tablet, sachet, soft gelatin capsule, sprinkle oral powder, or granules. In one embodiment, the composition is a gummy candy, which is made from a gelatin base, giving the candy elasticity, desired chewy consistency, and longer shelf-life. In some embodiments, the gummy candy may also comprise sweeteners or flavors.

[0460] In one embodiment, the composition suitable for administration to pediatric subjects may include a flavor. As used herein, “flavor” is a substance (liquid or solid) that provides a distinct taste and aroma to the formulation. Flavors also help to improve the palatability of the formulation. Flavors include, but are not limited to, strawberry, vanilla, lemon, grape, bubble gum, and cherry.

[0461] In certain embodiments, the genetically engineered microorganisms may be orally administered, for example, with an inert diluent or an assimilable edible carrier. The compound may also be enclosed in a hard or soft shell gelatin capsule, compressed into tablets, or incorporated directly into the subject's diet. For oral therapeutic administration, the compounds may be incorporated with excipients and used in the form of ingestible tablets, buccal tablets, troches, capsules, elixirs, suspensions, syrups, wafers, and the like. To administer a compound by other than parenteral administration, it may be necessary to coat the compound with, or co-administer the compound with, a material to prevent its inactivation.

[0462] In another embodiment, the pharmaceutical composition comprising the recombinant bacteria of the invention may be a comestible product, for example, a food product. In one embodiment, the food product is milk, concentrated milk, fermented milk (yogurt, sour milk, frozen yogurt, lactic acid bacteria-fermented beverages), milk powder, ice cream, cream cheeses, dry cheeses, soybean milk, fermented soybean milk, vegetable-fruit juices, fruit juices, sports drinks, confectionery, candies, infant foods (such as infant cakes), nutritional food products, animal feeds, or dietary supplements. In one embodiment, the food product is a fermented food, such as a fermented dairy product. In one embodiment, the fermented dairy product is yogurt. In another embodiment, the fermented dairy product is cheese, milk, cream, ice cream, milk shake, or kefir. In another embodiment, the recombinant bacteria of the invention are combined in a preparation containing other live bacterial cells intended to serve as probiotics. In another embodiment, the food product is a beverage. In one embodiment, the beverage is a fruit juice-based beverage or a beverage containing plant or herbal extracts. In another embodiment, the food product is a jelly or a pudding. Other food products suitable for administration of the recombinant bacteria of the invention are well known in the art. For example, see U.S. 2015/0359894 and US 2015/0238545, the entire contents of each of which are expressly incorporated herein by reference. In yet another embodiment, the pharmaceutical composition of the invention is injected into, sprayed onto, or sprinkled onto a food product, such as bread, yogurt, or cheese.

[0463] In some embodiments, the composition is formulated for intraintestinal administration, intrajejunal administration, intraduodenal administration, intraileal administration, gastric shunt administration, or intracolic administration, via nanoparticles, nanocapsules, microcapsules, or microtablets, which are enterically coated or uncoated. The pharmaceutical compositions may also be formulated in rectal compositions such as suppositories or retention enemas, using, e.g., conventional suppository bases such as cocoa butter or other glycerides. The compositions may be suspensions, solutions, or emulsions in oily or aqueous vehicles, and may contain suspending, stabilizing and/or dispersing agents.

[0464] The genetically engineered microorganisms described herein may be administered intranasally, formulated in an aerosol form, spray, mist, or in the form of drops, and conveniently delivered in the form of an aerosol spray presentation from pressurized packs or a nebuliser, with the use of a suitable propellant (e.g., dichlorodifluoromethane, trichlorofluoromethane, dichlorotetrafluoroethane, carbon dioxide or other suitable gas). Pressurized aerosol dosage units may be determined by providing a valve to deliver a metered amount. Capsules and cartridges (e.g., of gelatin) for use in an inhaler or insufflator may be formulated containing a powder mix of the compound and a suitable powder base such as lactose or starch.

[0465] The genetically engineered microorganisms may be administered and formulated as depot preparations. Such long acting formulations may be administered by implantation or by injection, including intravenous injection, subcutaneous injection, local injection, direct injection, or infusion. For example, the compositions may be formulated with suitable polymeric or hydrophobic materials (e.g., as an emulsion in an acceptable oil) or ion exchange resins, or as sparingly soluble derivatives (e.g., as a sparingly soluble salt).

[0466] In some embodiments, disclosed herein are pharmaceutically acceptable compositions in single dosage forms. Single dosage forms may be in a liquid or a solid form. Single dosage forms may be administered directly to a patient without modification or may be diluted or reconstituted prior to administration. In certain embodiments, a single dosage form may be administered in bolus form, e.g., single injection, single oral dose, including an oral dose that comprises multiple tablets, capsule, pills, etc. In alternate embodiments, a single dosage form may be administered over a period of time, e.g., by infusion.

[0467] Single dosage forms of the pharmaceutical composition may be prepared by portioning the pharmaceutical composition into smaller aliquots, single dose containers, single dose liquid forms, or single dose solid forms, such as tablets, granulates, nanoparticles, nanocapsules, microcapsules, microtablets, pellets, or powders, which may be enterically coated or uncoated. A single dose in a solid form may be reconstituted by adding liquid, typically sterile water or saline solution, prior to administration to a patient.

[0468] In other embodiments, the composition can be delivered in a controlled release or sustained release system. In one embodiment, a pump may be used to achieve controlled or sustained release. In another embodiment, polymeric materials can be used to achieve controlled or sustained release of the therapies of the present disclosure (see e.g., U.S. Pat. No. 5,989,463). Examples of polymers used in sustained release formulations include, but are not limited to, poly(2-hydroxy ethyl methacrylate), poly(methyl methacrylate), poly(acrylic acid), poly(ethylene-co-vinyl acetate), poly(methacrylic acid), polyglycolides (PLG), polyanhydrides, poly(N-vinyl pyrrolidone), poly(vinyl alcohol), polyacrylamide, poly(ethylene glycol), polylactides (PLA), poly(lactide-co-glycolides) (PLGA), and polyorthoesters. The polymer used in a sustained release formulation may be inert, free of leachable impurities, stable on storage, sterile, and biodegradable. In some embodiments, a controlled or sustained release system can be placed in proximity of the prophylactic or therapeutic target, thus requiring only a fraction of the systemic dose. Any suitable technique known to one of skill in the art may be used.

[0469] Dosage regimens may be adjusted to provide a therapeutic response. Dosing can depend on several factors, including severity and responsiveness of the disease, route of administration, time course of treatment (days to months to years), and time to amelioration of the disease. For example, a single bolus may be administered at one time, several divided doses may be administered over a predetermined period of time, or the dose may be reduced or increased as indicated by the therapeutic situation. The specification for the dosage is dictated by the unique characteristics of the active compound and the particular therapeutic effect to be achieved. Dosage values may vary with the type and severity of the condition to be alleviated. For any particular subject, specific dosage regimens may be adjusted over time according to the individual need and the professional judgment of the treating clinician. Toxicity and therapeutic efficacy of compounds provided herein can be determined by standard pharmaceutical procedures in cell culture or animal models. For example, LD₅₀, ED₅₀, EC₅₀, and IC₅₀ may be determined, and the dose ratio between toxic and therapeutic effects (LD₅₀/ED₅₀) may be calculated as the therapeutic index. Compositions that exhibit toxic side effects may be used, with careful modifications to minimize potential damage to reduce side effects. Dosing may be estimated initially from cell culture assays and animal models. The data obtained from in vitro and in vivo assays and animal studies can be used in formulating a range of dosage for use in humans.

[0470] The ingredients are supplied either separately or mixed together in unit dosage form, for example, as a dry lyophilized powder or water-free concentrate in a hermetically sealed container such as an ampoule or sachet indicating the quantity of active agent. If the mode of administration is by injection, an ampoule of sterile water for injection or saline can be provided so that the ingredients may be mixed prior to administration.

[0471] The pharmaceutical compositions may be packaged in a hermetically sealed container such as an ampoule or sachet indicating the quantity of the agent. In one embodiment, one or more of the pharmaceutical compositions is supplied as a dry sterilized lyophilized powder or water-free concentrate in a hermetically sealed container and can be reconstituted (e.g., with water or saline) to the appropriate concentration for administration to a subject. In an embodiment, one or more of the prophylactic or therapeutic agents or pharmaceutical compositions is supplied as a dry sterile lyophilized powder in a hermetically sealed container stored between 2° C. and 8° C. and administered within 1 hour, within 3 hours, within 5 hours, within 6 hours, within 12 hours, within 24 hours, within 48 hours, within 72 hours, or within one week after being reconstituted. Cryoprotectants can be included for a lyophilized dosage form, principally 0-10% sucrose (optimally 0.5-1.0%). Other suitable cryoprotectants include trehalose and lactose. Other suitable bulking agents include glycine and arginine, either of which can be included at a concentration of 0-0.05%, and polysorbate-80 (optimally included at a concentration of 0.005-0.01%). Additional surfactants include but are not limited to polysorbate 20 and BRIJ surfactants. The pharmaceutical composition may be prepared as an injectable solution and can further comprise an agent useful as an adjuvant, such as those used to increase absorption or dispersion, e.g., hyaluronidase.

[0472] In some embodiments, the genetically engineered microorganisms and composition thereof is formulated for intravenous administration, intratumor administration, or peritumor administration. The genetically engineered microorganisms may be formulated as depot preparations. Such long acting formulations may be administered by implantation or by injection. For example, the compositions may be formulated with suitable polymeric or hydrophobic materials (e.g., as an emulsion in an acceptable oil) or ion exchange resins, or as sparingly soluble derivatives (e.g., as a sparingly soluble salt).

[0473] In some embodiments, the genetically engineered OVs are prepared for delivery, taking into consideration the need for efficient delivery and for overcoming the host antiviral immune response. Approaches to evade antiviral response include the administration of different viral serotypes as part of the treatment regimen (serotype switching), formulation, such as polymer coating to mask the virus from antibody recognition and the use of cells as delivery vehicles.

[0474] In another embodiment, the composition can be delivered in a controlled release or sustained release system. In one embodiment, a pump may be used to achieve controlled or sustained release. In another embodiment, polymeric materials can be used to achieve controlled or sustained release of the therapies of the present disclosure (see e.g., U.S. Pat. No. 5,989,463). Examples of polymers used in sustained release formulations include, but are not limited to, poly(2-hydroxy ethyl methacrylate), poly(methyl methacrylate), poly(acrylic acid), poly(ethylene-co-vinyl acetate), poly(methacrylic acid), polyglycolides (PLG), polyanhydrides, poly(N-vinyl pyrrolidone), poly(vinyl alcohol), polyacrylamide, poly(ethylene glycol), polylactides (PLA), poly(lactide-co-glycolides) (PLGA), and polyorthoesters. The polymer used in a sustained release formulation may be inert, free of leachable impurities, stable on storage, sterile, and biodegradable. In some embodiments, a controlled or sustained release system can be placed in proximity of the prophylactic or therapeutic target, thus requiring only a fraction of the systemic dose. Any suitable technique known to one of skill in the art may be used.

[0475] The genetically engineered bacteria of the invention may be administered and formulated as neutral or salt forms. Pharmaceutically acceptable salts include those formed with anions such as those derived from hydrochloric, phosphoric, acetic, oxalic, tartaric acids, etc., and those formed with cations such as those derived from sodium, potassium, ammonium, calcium, ferric hydroxides, isopropylamine, triethylamine, 2-ethylamino ethanol, histidine, procaine, etc.

### Methods of Treatment

[0476] Another aspect of the invention provides methods of treating the coronavirus disease 2019 (COVID-19). In some embodiments, the invention provides methods for reducing, ameliorating, or eliminating one or more symptom(s) associated with COVID-19. In some embodiments, the symptom(s) associated thereof include, but are not limited to, runny nose, sneezing, headache, cough, sore throat, fever, or short of breath. In more severe cases, coronavirus infection can cause pneumonia, severe acute respiratory syndrome, kidney failure and even death.

[0477] The method may comprise preparing a pharmaceutical composition with at least one genetically engineered species, strain, or subtype of bacteria described herein, and administering the pharmaceutical composition to a subject in a therapeutically effective amount. The genetically engineered microorganisms may be administered intravenously, intranasally, intra-arterially, intramuscularly, intraperitoneally, orally, or topically. In some embodiments, the genetically engineered microorganisms are administered intravenously, i.e., systemically.

[0478] In certain embodiments, administering the pharmaceutical composition to the subject reduces viral infection in a subject. In some embodiments, the methods of the present disclosure may reduce viral infection by at least about 10% to 20%, 20% to 25%, 25% to 30%, 30% to 40%, 40% to 50%, 50% to 60%, 60% to 70%, 70% to 75%, 75% to 80%, 80% to 85%, 85% to 90%, 90% to 95%, 95% to 99%, or more as compared to levels in an untreated or control subject.

[0479] For genetically engineered microorganisms expressing immune-based immune modulators, responses patterns may be different than for traditional cytotoxic therapies. Thus, the pharmaceutical composition comprising the gene or gene cassette for producing the immune modulator may be re-administered at a therapeutically effective dose and frequency. In alternate embodiments, the genetically engineered bacteria are not destroyed within hours or days after administration and may propagate in the target site.

[0480] The pharmaceutical composition may be administered alone or in combination with one or more additional therapeutic agents, e.g., as described herein and known in the art. An important consideration in selecting the one or more additional therapeutic agents is that the agent(s) should be compatible with the genetically engineered bacteria of the invention, e.g., the agent(s) must not kill the bacteria.

[0481] In certain embodiments, the pharmaceutical composition may be administered to a subject by administering a first genetically engineered bacterium to the subject, wherein the first genetically engineered bacterium comprises at least one gene encoding a first immune initiator; and administering a second genetically engineered bacterium to the subject, wherein the second genetically engineered bacterium comprising at least one gene encoding a second immune initiator. In some embodiments, the administering steps are performed at the same time. In some embodiments, administering the first genetically engineered bacterium to the subject occurs before the administering of the second genetically engineered bacterium to the subject. In some embodiments, administering of the second genetically engineered bacterium to the subject occurs before the administering of the first genetically engineered bacterium to the subject. In some embodiments, the ratio of the first genetically engineered bacterium to the second genetically engineered bacterium is 5:1, 4:1, 3:1, 2:1, 1:1, 1:2, 1:3, 1:4, or 1:5. In some embodiments, the ratio of the second genetically engineered bacterium to the first genetically engineered bacterium is 5:1, 4:1, 3:1, 2:1, 1:1, 1:2, 1:3, 1:4, or 1:5.

### Treatment In Vivo

[0482] The modified microorganisms may be evaluated in vivo, e.g., in an animal model. Any suitable animal model of a disease or condition associated with COVID-19 may be used. The genetically engineered bacteria may be administered to the animal systemically or locally, e.g., via oral administration (gavage), intravenous, or subcutaneous injection or via intranasal injection, and treatment efficacy determined.

### EXAMPLES

[0483] The following examples provide illustrative embodiments of the disclosure. One of ordinary skill in the art will recognize the numerous modifications and variations that may be performed without altering the spirit or scope of the disclosure. Such modifications and variations are encompassed within the scope of the disclosure. The Examples do not in any way limit the disclosure.

[0484] The disclosure provides herein a sequence having at least about 80%, at least about 85%, at least about 90%, at least about 95%, or at least about 99% homologous to the sequence any of the SEQ ID NOs described in the Examples, below.

### Example 1. Development of Vaccine for Prevention of COVID19

[0485] The capsid spike (S) protein of SARS-CoV2 virus initiates attachment to the angiotensin converting enzyme 2 (ACE2) receptor expressed on the surface of human epithelial cells, facilitating viral entry. The receptor binding domain (RBD) region of the spike protein interacts directly with the ACE2 receptor. Neutralizing antibodies directed against S protein have been observed in patients that have recovered from COVID-19, making S protein and its RBD region an attractive target for vaccine development.

[0486] A vaccine for the prevention of COVID19 (or SARS-CoV2) is developed by utilizing synthetic biology techniques to engineer probiotic bacteria that express viral antigens (S-protein RBD) and immune activators/adjuvants. This vaccine is based on an engineered E. coli Nissle (EcN) bacterial strain that expresses viral spike protein receptor binding domain (RBD) from SARS-CoV2, the causative agent for COVID-19 on its cell surface, and can be administered intranasally to induce protective immunity systemically and at mucosal surfaces.

[0487] Specifically, SYNB1891, a clinical candidate for anti-tumor immunity currently in phase I clinical trials, is used as a starting point for engineering. This strain is designed to stimulate the immune system by producing immune activators/adjuvants.

[0488] To successfully generate neutralizing antibodies against the RBD region of SARS-CoV2 spike protein, it is essential that the RBD region expressed and displayed on the surface of EcN be conformationally similar to the native RBD region found on SARS-CoV2 spike protein. Even a slight change in the folding and conformation of RBD region on the surface of EcN can lead to the generation of antibodies that are not efficacious against neutralizing the virus. In addition, since spike protein is a glycosylated protein and EcN expresses proteins that are un-glycosylated, this has the potential to impact the conformation and therefore of efficacy of the generated antibody response against SARS CoV-2. Therefore, to minimize the risk of conformational dissimilarity, a bioinformatics approach is employed to perform a structural analysis of the RBD region and a library of RBD expression constructs is designed with construct having varying sizes of flanking sequences on either side to maximize the probability of correct folding.

[0489] A genomic library of RBD constructs containing linker regions of various lengths, fused to an appropriate outer membrane-anchoring domain is generated. Several potential anchoring domains were identified to facilitate the delivery of protein to the cell service. The RBD construct libraries are fused to the top 3 anchoring domains. To assess proper display on the cell surface, a high throughput assay is developed. Briefly, a structurally-specific α-RBD antibody (with conjugated fluorophore) is used to stain cells expressing members of the RBD library. Whole cells that acquire fluorescence indicate that the antibody has successfully bound to the cell surface, which also indicates that the RBD library member is likely to be expressed in a conformationally relevant manner. Additionally, RBD constructs may adopt the native trimeric structure on the cell surface, so a secondary assay using recombinant ACE2 protein followed by staining with fluorophore-conjugated α-ACE2 antibody can also be attempted as a secondary screen.

[0490] Viral sensing by innate immune cells triggers various signaling cascades including Stimulator of Interferon Genes (STING), leading to the production of interferons and proinflammatory cytokines critical for induction of effective innate and adaptive anti-viral immunity (Lee, H., et al., 2019. Exp Mol Med 51, 1-13). The engineered bacterial strain SYNB1891 produces the STING agonist that triggers STING activation and Type I interferon production in antigen-presenting cells leading to the induction of tumor antigen-specific cytotoxic T-cell responses, and in preclinical models, efficacious antitumor immunity with the formation of immunological memory. SYNB1891 could be further engineered to induce antigen-specific mucosal and systemic immunity to SARS-CoV2.

[0491] SYNB medicines are well suited to advance an engineered bacterial product as a vaccine candidate for COVID-19. In particular, the EcN based vaccine confers several advantages when compared to the current anti-viral vaccine approaches as described below and shown in FIG. 2.

[0492] Efficacy: Rationally designed, specific viral antigens and immune activators as well as additional functionalities can be engineered into a single cell to induce an antigen specific mucosal and systemic immune response. The bacterial chassis itself provides adjuvant effects and allows direct uptake of concentrated antigen and activator by antigen presenting cells.

[0493] Safety: EcN has been used orally in human populations for over 100 years with a very good safety profile. EcN exhibits serum sensitivity to complement lysis and is susceptible to a broad array of antibiotics. The safety profile of EcN delivered intranasally should be similar. The vaccine of the present invention contains no live virus, and is delivered locally, so has the potential for a safety advantage over attenuated or recombinant viral and DNA vaccine approaches. Prevention of cell division using auxotrophies is engineered to avoid any uncontrolled bacterial growth in the body or the environment. The prototype, SYNB1891 injected intratumorally is now being evaluated in a clinical trial NCT04167137, providing additional human safety data.

[0494] Manufacturability: 6 million doses of vaccine can be produced in a single batch (at a dose level of 1×10⁹ live cells/dose).

[0495] Stability: SYNB lyophilized cells have room temperature stability for stockpiling. The vaccine would have to be lyophilized for adequate stockpiling and long term stability. There is a risk that the outer membrane of the bacteria is damaged during the lyophilization process, which could have the effect of damaging or denaturing surface-displayed components.

[0496] Therefore, the advancement over current anti-viral vaccine approaches is the integration of multiple desired features into a single organism to produce a vaccine with enhanced safety and specific immunity to viral antigens. Additionally, the technology is scalable to manufacture large quantities of vaccine.

### Technical Section:

[0497] The existing strain, SYNB1891, is engineered to express the conformationally stable spike protein (S-protein, receptor binding domain) of SARS-CoV2, a critical means of entry of the virus into respiratory cells and a target for other coronavirus vaccine initiatives (Du L., et al, 2019 Exp Mol Med 51, 1-13; Wan Y., et al., 2009 Nat Rev Microbiol. 7(3): 226-236; Wan Y., et al., 2020 J Virol 94: e00127-20; Chen W., et al., 2020. Current Tropical Medicine Reports. https://doi.org/10.1007/s40475-020-00201-6; Kirchdoerfer R, et al., 2018. Scientific Reports; 8: 15701). The strain is designed for the local intranasal delivery to enhance mucosal immunity in the respiratory tract where it will mimic natural entry of SARS-CoV2.

[0498] In other embodiments, the existing strain, SYNB1891, is engineered to express a epitope which induces a CTL response. In one embodiment, the epitope is in the viral nucleocapsid (N) and/or M protein. Such antigens and epitopes are well known in the art and described at least in Liu et al., Antiviral Research 137 (2017), 82-92; Huang et al., Vaccine 25 (2007):6981-6991; Ahmed et al., Viruses (2020) 12:254; Grifoni et al., Cell Host & Microbiome (2020) 27:1-10; and Chen et al., J. Immunol (2005) 175:591-598, the entire contents of each of which are expressly incorporated by reference herein in their entireties.

[0499] A clinical candidate strain that produces a STING Agonist has been engineered. Specifically, a strain of EcN, called SYNB1891, was engineered to produce the STING agonist, c-di-AMP, in the microenvironment by expressing the dacA gene from Listeria monocytogenes under the control of an inducible promoter. SYNB1891 serves as the background strain for further COVID19 vaccine development.

[0500] Biologically active proteins can be displayed on the EcN cell surface. The display of proteins on the E. coli surface has been previously described in the literature (Van Bloois E, et al, 2011. Trends Biotechnol. 29(2):79-86).

[0501] SYNB1891 has been demonstrated to induce innate and adaptive immune responses. SYNB1891 mechanisms of action include upregulation of 2 innate immune axes: [1] direct STING activation by c-di-AMP and [2] activation of other pattern recognition receptors (including TLR4) by the bacterial chassis itself. SYNB1891 was able to induce Type I IFNs and proinflammatory cytokines from mouse and human dendritic cells and locally in the tumor. The ability of SYNB1891 to induce Type I IFNs in addition to proinflammatory cytokines led to the development of functional anti-tumor CD8+ T cells and immunological memory. These data demonstrate that SYNB1891 triggers relevant innate immune pathways that lead to antigen-specific activation of CD8+ T cell response. Since SYNB1891 mechanisms of action are similarly important for the development of protective anti-viral immunity, these data validate the use of SYNB1891 as a strain to express the SARS-CoV2 antigen.

[0502] Safety has been engineered directly applicable to a potential vaccine candidate. From a safety and regulatory perspective, biocontainment controls are critical elements of a bacterial-based live therapeutic designed for clinical use. The EcN chassis itself shows serum sensitivity (Grozdanov L, et al., 2002, J Bacteriol; 184:5912-25), antibiotic sensitivity and unable to colonize human gut. Yet, engineered Thymidine (thy) and Diaminopimelic acid (dap) auxotrophies, implemented in SYNB1891 led to inability of this bacterial strain to colonize and proliferate even in immuno-privileged tumor environment. SYNB1891-specific qPCR showed low or absent bacterial biodistribution outside of site of injection.

[0503] Bacterial vaccines are not a new concept. There are approved live bacterial vaccines (i.e. for cholera) as well as vaccines being explored in clinical trials and preclinically (Ming Zeng, et al., 2015. Lancet; 386: 1457-64; Thorstensson R, et al., 2014. PLoS ONE 9(1): e83449; Pei-Feng Liu, et al. 2017. Nat Sci. 3(2): e317; Nathalie Mielcarek et al. 2001. Advanced Drug Delivery Reviews 51: 55-69; Adilson José da Silva, et al. 2014. Brazilian Journal of Microbiology 45, 4, 1117-1129). However, induction of an immune response to SARS-CoV2 by any vaccine could generate antibodies that may potentiate immunopathology during infection. This present application also include studies to evaluate both efficacy and safety of the vaccine in at least 2 species (rodent and non-rodent) in the context of a live viral infection with SARS-CoV2.

### Ability to Transition Technology and Expand Use

[0504] Probiotic EcN strains have been engineered for the treatment of metabolic diseases, immunologic diseases, and cancer, and have been tested in Phase 1/2 clinical trials, in healthy volunteers as well as in patients. Multiple doses of vaccine under cGMP can be manufactured for human use. The manufacturing capabilities currently allow for cGMP production of batch sizes of up to 300 L, in both liquid and solid presentations. Numerous batches are ran throughout the year to support high level of demands. These core competencies of genetic engineering, clinical development and manufacturing provide the ability to deploy a validated platform for the development and production of a COVID-19 vaccine. Additionally, the technology developed here for a COVID-19 vaccine could be readily deployed for other respiratory viruses.

[0505] Task 1. Engineering: The current SYNB1891 strain (expressing STING agonist c-di-AMP, double auxotrophy) is engineered to express the SARS-CoV2 Spike-protein Receptor Binding Domain (S-protein RBD).

[0506] Steps:
[0507] 1. Design, build and transform plasmids containing expression cassettes for S-protein with various arrangements (e.g. RBD region only, tandem design, or fusion proteins) targeted for EcN surface display.
[0508] 2. Demonstrate expression of antigen on the surface of EcN in vitro, in a biologically active conformation.
[0509] 3. Demonstrate the production of c-di-AMP along with antigen display on the surface of EcN SYNB1891 strain carrying plasmids described above.
[0510] 4. Integrate key genetic elements into the chromosome of EcN SYNB1891 and demonstrate the production of c-di-AMP and surface display of antigen in final integrated strain in vitro.

[0511] An EcN strain with genetic circuits designed for the production of c-di-AMP production as well as surface display of antigen of S-protein (or variants thereof) in a biologically relevant conformation. The strain will also be engineered to contain a dual auxotrophy for diaminopimelic acid and thymidine, to inhibit replication in vivo and for biocontainment.

[0512] Task 2. Initial in vivo characterization: Characterize engineered SARS-CoV2-S antigen expressing strains delivered intranasally to mice by evaluating initial tolerability, residence time and generation of S-antigen specific immune responses. Additionally explore oral route of vaccine delivery.

[0513] Steps:
[0514] 1. Develop all necessary assays to evaluate in vivo antibody and T cell responses.
[0515] 2. Demonstrate strain viability and residence time at the target mucosal surfaces.
[0516] 3. Evaluate distribution of live strain in upper respiratory tract, lungs, GI tract and blood. Assess initial mouse tolerability to the treatment/route of administration.
[0517] 4. Demonstrate generation of antigen-specific antibodies in the lungs (target organ), GI tract and blood of Balb/c and C57BL/6 mice after immunization. Characterize type of antibody response e.g., IgA, IgGs, IgE.
[0518] 5. Demonstrate generation and characterize antigen-specific T cell responses e.g., CD4+Th1/Th2 ratio, CD8+ T cell activation.

[0519] Demonstrate generation of antigen-specific antiviral T cell responses (mostly protective CD4+Th1 and CD8+ T cells without overactivation/skewing to Th2-cell response). Demonstrate anti-viral antibody production (mucosal and systemic) in the immunized mice. Select engineered SARS-CoV2-S antigen expressing strain and route of vaccine administration for further evaluation.

[0520] Task 3. Efficacy: Test development of protective immunity and neutralizing antibody responses. This work will require collaboration with a BSL3 laboratory capable of infecting a sensitive mouse strain with SARS-CoV2.

[0521] Steps:
[0522] 1. Viral neutralization: Test ability of serum and mucosal antibody to neutralize and prevent infection of human lung epithelial cells with SARS-CoV2.
[0523] 2. Anti-viral CTL response: Test ability of CD8+ T cells to kill mouse hACE2+ lung epithelial cells infected with SARS-CoV2 or mouse epithelial cells expressing viral S protein.
[0524] 3. Demonstrate generation of antigen-specific IgA/IgG antibodies in the lungs (target organ) and blood after immunization of K18-hACE2 transgenic mouse model (18) (or another mouse model susceptible to SARS CoV2) adopted for COVID-19 research. Additional models like ferrets and NHPs will also be considered.
[0525] 4. Demonstrate generation of protective immune response and survival of immunized K18-hACE2 transgenic mouse (or other SARS-CoV2 model) after infection with a lethal dose of SARs-CoV2.

[0526] Task 4. Safety: Evaluate safety of engineered SARS-CoV2-S antigen expressing strain in vivo. Part of this work will require collaboration with a BSL3 laboratory capable of infecting a sensitive mouse strain with SARS-CoV2.

[0527] Steps:
[0528] 1. Toxicology studies to test bacterial spread in blood and multiple organs (especially lungs and brain) by sensitive strain-specific qPCR.
[0529] 2. Examine systemic pro-inflammatory cytokine release e.g. IL-6, TNFα etc. after immunization.
[0530] 3. Evaluate undesired antibody-dependent enhancement of immunopathogenesis: increase of viral uptake through opsonizing antibody and overactivation of macrophages, B cells and DCs, resulting in disease enhancement and viral dissemination.
[0531] 4. Evaluate occurrence of Th2-type eosinophilic lung inflammation in immunized animals following SARS-CoV2 challenge.

### Example 2: Assay Development for Anchor-RBD Expression

### Western Blot

[0532] Anchor-RBD fusion protein constructs include an anchor domain, a linker, and an RBD. Optionally, the construct can include a FLAG tag and His tag. Expression of the RBD constructs were tested using anti-RBD antibodies from Elabscience®, R&D Systems, MyBioSource, GeneTex, Prosci Inc., and Invitrogen, among others listed below in Table 4.

TABLE 4

| Anti-RBD antibody tested | Vendor |
|---|---|
| Anti-Spike protein (RBD), Mouse IgG1-Fc fusion | Absolute Antibody |
| SARS-CoV2 Spike Protein antibody | Antibody Online |
| Mouse Anti 2019-nCoV Spike RBD Mab | Beta Lifescience |
| SARS-CoV-2 Spike RBD Nanobody | Cusabio |
| Anti-RBD (SARS-CoV-2)) Human Mab | Eenzyme |
| Anti-RBD Domain (SARS-CoV2 Spike) Mab | Elabscience |
| Rabbit anti-SARS-CoV-2 S1 RBD antibody | Raybiotech |
| SARS-CoV-2 Spike RBD Antibody | Sino Biological |

[0533] Western blot analysis was performed with whole cell lysates from frozen activated biomass. Anti-RBD antibodies were used from the sources listed herein (data not shown). The antibody from GeneTex provided the best specific binding to the RBD construct when compared to the control construct. Anti-RBD and anti-FLAG antibodies were run in parallel where possible. The RBD strains and fusion proteins tested are listed below in Table 5.

TABLE 5
Strains and constructs

| Sample | Description |
|---|---|
| SYN2610 | lppOmpA-FLAG-GFP-His |
| SYN7447 | lppOmpA-FLAG-RBD2-His |
| rRBD-HIS | His-tagged recomb. RBD |

### Flow Cytometry

[0534] RBD-construct expressing strains were analyzed by flow cytometry (FCM) against the RBD, and the FLAG and HIS tags (FIG. 8).

[0535] Briefly, a sample from a bacterial culture measuring OD₆₀₀=0.2 per 1 mL was transferred to an 1.5 mL tube and 1 mL of cold PBS was added. The sample was centrifuged for 1 min at 10,000 rpm and the supernatant was removed. The cell pellet was washed in PBS and resuspended in 1 mL PBS. 100 μL of the resuspended solution was centrifuged and the supernatant was removed. The cells were resuspended in 100 μL of staining buffer (PBS containing 0.5% BSA) and incubated for 1 hr at room temperature. 1 μL of APC anti-HIS tag antibody or APC anti-FLAG tag antibody was added to the tube, mixed, and incubated for 30 mins at room temperature in the dark. After incubation, 1 mL of staining buffer was added and the tube was centrifuged for 1 min at 10,000 rpm. The supernatant was removed and the washing step was repeated twice. The cell pellet was resuspended in 450 μL PBS and the tube was placed on ice. Samples of 200 μL were transferred to a 96-well plate and placed on the holder of the flow cytometry. Cell counting was performed with flow cytometry.

[0536] For anti-RBD, a sample from a bacterial culture measuring OD₆₀₀=0.2 per 1 mL was transferred to an 1.5 mL tube and 1 mL of cold PBS was added. The sample was centrifuged for 1 min at 10,000 rpm and the supernatant was removed. The cell pellet was washed in PBS and resuspended in 1 mL PBS. 100 μL of the resuspended solution was centrifuged and the supernatant was removed. The cells were resuspended in 100 μL of staining buffer (PBS containing 0.5% BSA) and incubated for 1 hr at room temperature. Primary antibody (0.4 μL) was added to the tube, mixed, and incubated for 2 hrs at room temperature. After incubation, 1 mL of staining buffer was added and the tube was centrifuged for 1 min at 10,000 rpm. The supernatant was removed and the washing step was repeated twice. The cell pellet was resuspended in 100 μL of cold staining buffer and 2 μL secondary antibody was added and mixed. The tube was incubated for 1 hr at room temperature in the dark. At the end of incubation, 1 mL of staining buffer was added to the tube and the tube was centrifuged for 1 min at 10,000 rpm. The supernatant was removed and the washing step was repeated twice more. The cell pellet was resuspended in 450 μL PBS and the tube was placed on ice. Samples of 200 μL were transferred to a 96-well plate and placed on the holder of the flow cytometry. Cell counting was performed with flow cytometry performed.

[0537] The strains used in FIG. 8 are described in Table 6, and the antibodies used in FCM are described in Table 7.

TABLE 6
Strains (FIG. 8)

| Strains | Description |
|---|---|
| SYN94 | Control |
| SYN2610 | LppOmpA-FLAG-GFP-His |
| SYN2615 | LppOmpA-FLAG-scFV-His |
| SYN7447 | LppompA-FLAG-RBD2-His |

TABLE 7
Antibodies (FIG. 8)

| Antibody | Vendor |
|---|---|
| APC anti-His Tag Ab | Biolegend |
| APC anti-Flag Tag Ab (clone L5) | Biolegend |
| SARS-COV-2 Spike RBD Pab | Elabscience |
| Rabbit IgG APC-conjugated Ab | R&D systems |

[0538] RBD-construct expressing strains were analyzed by flow cytometry (FCM) against the RBD and APC-tagged secondary antibody (FIG. 9). Strains and RBD-containing fusion protein was expressed at 37° C. The strains described in Table 6 were analyzed. The anchor was LppOmpA, Intimin, IgAMEP, or YiaT. The antibodies against RBD tested are listed in Table 8 below.

TABLE 8
Strains (FIG. 9)

| Strain | Description |
|---|---|
| SYN94 | Control |
| SYN2610 | LppOmpA-FLAG-GFP-His |
| SYN2615 | LppOmpA-FLAG-scFV-His |
| SYN7192 | Intimin-FLAG-aEGFRnb-His |
| SYN7358 | Intimin-FLAG-RBDSD1-His |
| SYN7436 | His-RBD2-FLAG-IgAMEP |
| SYN7442 | Intimin-RBDSD1 x3 |
| SYN7443 | Intimin-FLAG-RBDSD1x 2 |
| SYN7444 | YiaT-FLAG-RBD2-His |
| SYN7445 | Intimin-FLAG-RBD2-His |
| SYN7447 | LppompA-FLAG-RBD2-His |

[0539] Prior to FCM, protein expression was tested both 30° C. or 37° C. Expression of RDB-containing fusion protein was better at 37° C. FIG. 9 shows strains SYN7444 and SYN7447 with RBD-containing fusion proteins with anchors YiaT and OmpA, respectively, exhibited the best display of RBD antigens.

[0540] RBD-construct expressing strains were analyzed by flow cytometry (FCM) by binding by ACE2-His-APC to RBD (FIG. 10). Strains were grown and RBD-containing fusion protein was expressed at 37° C. Strains SYN94 (control); SYN7192 (Intimin-FLAG-aEGFRnb-His); SYN7358 (Intimin-FLAG-RBDSD1-His); SYN7442 (Intimin-RBDSD1×3); SYN7443 (Intimin-FLAG-RBDSD1×2); SYN7444 (YiaT-FLAG-RBD2-His); and SYN7445 (Intimin-FLAG-RBD2-His) were analyzed. All strains expressed an RBD fused to an Intimin anchor. For staining, tubes were thawed on ice and then centrifuged for 1 minute at 10,000 rpm. Supernatants were discarded. The cells were then washed with 1 mL cold PBS, and the pellet was resuspended in 1% BSA of ice-cold PBS buffer at OD=0.4, and the tubes were placed on ice for 1 hour at room temperature. 100 microliters of the cell suspension was placed into new tubes for ACE2 staining. 0.4 microliters of APC-ACE2-HIS were placed into a tube and incubated for 75 minutes at room temperature in the dark. The cells were then washed with 1 mL cold PBS containing 1% BSA three times. Next, the cells were resuspended in 450 microliters of cold PBS, 200 microliters were transferred into a well of a 96-well plate, and FC analysis was performed. FIG. 10 shows ACE2-His preferentially bound to Intimin-RBD fusion protein displayed on strain SYN7442 when compared to strains displaying Intimin-Flag-RBD fusion proteins.

[0541] Strains expressing RDB fused to the anchor Intimin or LppOmpA as a control were analyzed by flow cytometry by binding by ACE2-His-APC (FIG. 11A) or aRBD-EL antibody (FIG. 11B) with an APC-tagged secondary antibody. Strains were grown and RBD-containing fusion protein was expressed at 37° C. Strains SYN94 (control); SYN7192 (Intimin-FLAG-aEGFRnb-His); SYN7442 (Intimin-RBDSD1×3); SYN7443 (Intimin-FLAG-RBDSD1×2); SYN7445 (Intimin-FLAG-RBD2-His); and SYN7358 (Intimin-FLAG-RBDSD1-His) were analyzed for ACE2-His binding (FIG. 11A). Strains SYN94 (control); SYN7447 (LppompA-FLAG-RBD2-His); SYN7442 (Intimin-RBDSD1×3); SYN7443 (Intimin-FLAG-RBDSD1×2); and SYN7358 (Intimin-FLAG-RBDSD1-His) were analyzed for aRBD-EL binding (FIG. 11B).

[0542] Plasmids from strains SYN7444 (YiaT-FLAG-RBD2-His) and SYN7447 (LppOmpA-FLAG-RBD2-His) were transformed into strain SYN1891 (STING agonist production circuit) resulting in strains SYN7597 and SYN7598, respectively (FIG. 12). Stains SYN7597 and SYN7598 expressed RBD fused to YiaT and LppOmpA were analyzed by flow cytometry against FLAG, RBD, and His individually, and APC-tagged secondary antibody (FIG. 12). Stains SYN7597 and SYN7598 were compared to control strains SYN4933 (control), SYN7594 (OmpA-FLAG-GFP-His), SYN7595 (OmpA-FLAG-scFV-His), and SYN7596 (YiaT-FLAG-GFP-His). Both stains SYN7597 and SYN7598 expressing RBD showed binding to the RBD antibody, while the control strains did not.

### Example 3: Anchor-RBD Expressing Bacteria in Mice

### Aims and Significance

[0543] The bacterium as described herein is being used to develop a mucosally (administration of vaccines at one or more mucosal sites such as nasal, or oral) or systemically (administration of vaccine into the circulatory system) delivered vaccine to combat the severe acute respiratory syndrome (SARS)-coronavirus 2 (CoV2) pandemic. The protocol described herein assessed initial mouse tolerability to the treatment and the route of administration (e.g., intranasal (IN) or intramuscular (IM) delivery); 2) evaluated safety by biodistribution of live bacteria in upper respiratory tract, lungs, and blood; 3) demonstrated strain viability and residence time at the target mucosal surfaces; and 4) developed models and evaluate in vivo generation of viral antigen-specific antibodies (e.g. antibody production significant enough to provide long-term resistance to the SARS-CoV2 virus) and T cell responses after immunization (e.g., cytokine production).

### Features of COVID-19 Vaccine

[0544] A viral protein (e.g., S-protein, RBD) was expressed in a bacterial chassis to deliver the viral protein to antigen-presenting cells (APCs) as a bacterial ligand. APC activation results in pro-inflammatory cytokines and chemokines induced by bacterial ligands. The viral antigen is presented to CD4 T cells and CD8 T cells and some B cells are activated.

[0545] The viral protein is displayed on the bacterial surface and presented to B cells as a particle with multiple surface epitopes. Optimal B cell activation will occur through B cell receptor cross-linking resulting in optimal antibody generation.

[0546] In some embodiments, a second microorganism that express an immune initiator (e.g., STING agonist) are administered. STING agonist are capable of inducing Type I IFN production and upregulation of multiple anti-viral ISGs. Presentation of viral antigen to CD8 cells are enhanced and cytotoxic response is activated against infected host cells. Optimally, anti-viral neutralizing antibodies will be produced.

[0547] The viability of the modified microorganism is important for continued exposure to the viral protein to B cells and APCs in high concentration and the correct conformation of the viral proteins. Continuous production of STING ligand and exposure to APCs is at high local concentrations. Sustained viability of the modified microorganism prevents bacterial lysis and dissemination of bacterial ligands and proteins.

[0548] The modified microorganism may contain an auxotrophy to prevent bacterial propagation.

[0549] Intranasal delivery mimics viral entry route into the body. Mucosal exposure is safer that systemic delivery. Intranasal delivery can result in enhanced mucosal immunity of upper respiratory tract including activating B cells and T cells and ultimately result in systemic immunity.

### Methods

[0550] Acronyms: BALF=broncho-aveolar lavage fluid; CFU=colony-forming unit; CFA=Complete Freund's adjuvant.

### Pilot Study to Assess Intramuscular Dosing of Bacteria:

[0551] Intramuscular injection is a common, efficacious route to administer vaccines in people. Introducing a vaccine into muscle will provide a depot for the vaccine antigen to reach antigen-presenting immune cells as well as into draining lymph nodes and blood for initiation of systemic immune responses.

[0552] To establish a mouse model via intramuscular dosing of bacteria, pilot studies included a single dose of 10e7, 10e8 or 10e9 CFU dose of wild-type probiotic E. coli Nissle 1917 bacteria or SYN4740 (bacterial control, auxotrophy) in maximum 50 L intramuscularly in the quadriceps. Mice were monitored for side effects and development of systemic inflammation (e.g. decreased mobility/activity, hunched posture, scruffy coat, and loss of body weight). Some animals were then sacrificed at various timepoints (e.g., 1 hrs, 5 hrs, 24 hrs) post injection. Terminal blood samples and BALF were collected for CFU assay to look into biodistribution and survival of bacteria.

### Pilot Study to Assess Intranasal Dosing of Bacteria:

[0553] Intranasal inoculation of anti-viral vaccines that mimics natural entry of a pathogen might effectively prevent respiratory viral infections and induce strong local (in the lungs) and systemic immune responses. Several immunological aspects of NALT like specific antigen-presenting cell subsets and migration of B cells (antibody-producing cell) preferentially to respiratory tract might lead to anti-viral responses in the nasal cavity and lungs and will significantly reduce risk of the COVID-19 infection. Intranasal dosing has also been shown to sometimes be more effective than intramuscular vaccination, so testing both of these methods will allow us to determine the best possible route for vaccine delivery.

[0554] To establish a mouse model via intranasal dosing of bacteria, pilot studies included a single dose of 10e7, 10e8 or 10e9 CFU dose of wild-type probiotic E. coli Nissle 1917 bacteria or SYN4740 (bacterial control, auxotrophy) in maximum 25 μL in each nostril. Mice were monitored for side effects and development of systemic inflammation (please see above). Some animals were then sacrificed at various timepoints (e.g., 1 hrs, 5 hrs, 24 hrs) post injection. Terminal blood samples and BALF were collected for CFU assay to look into biodistribution and survival of bacteria.

[0555] In Vivo Vaccine Characterization

[0556] The goal in the study was to characterize anti-viral S-antigen specific antibody response induced by engineered EcN strains expressing SARS-CoV2-S antigen delivered intranasally or intramuscularly. Groups of mice were dosed intranasally or intramuscularly with different strains of bacteria at 1e8 total cells at day 0 of week 1. At week 4, mice were re-immunized and a week later euthanized. BALF and blood samples were processed and analyzed for total IgG and IgA antibodies by ELISA.

[0557] Immunization positive control (2ug of S-antigen viral protein mixed with Complete Freund's adjuvant) was used subcutaneously as described above.

[0558] Intranasal administration (IN): Animals were anesthetized with inhaled isoflurane (3.0-5.0% for induction and 1.0-3.0% for maintenance) for IN administration. For IN procedure, the mouse was held gently in the hand ventral side up with the head tilted so it is above the feet. A pipet was used to slowly pipet up to 25 μl of the solution onto one nostril, then up to 25 μl onto the other nostril for up to 50 μl total (do not insert the pipet tip into the nostril). Note: the solution was not aerosolized. The solution was taken up into the sinuses and down into the lungs. During the administration, the mouse was allowed to maintain a normal breathing pattern before receiving further dose. Animals were continuously monitored until they achieve sternal recumbency and regain the righting reflex.

[0559] Intramuscular injection (IM): Animals were anesthetized with inhaled isoflurane (3.0-5.0% for induction and 1.0-3.0% for maintenance) for IM injections. For IM procedure, needle was attached (25-30G) to the appropriate size syringe for the dose to be administered. The material to be administered was drawn up into the syringe. The animal was removed from anesthesia induction chamber and manually restrain it. If necessary, the designated area was palpated in order to locate the quadriceps or the gastrocnemii muscle. The needle was inserted, bevel up, into the muscle. The entire bevel was inserted into the muscle. Blood was aspirated by gently pulling back on the plunger of the syringe. If blood did not appear in the syringe, the material was slowly administered in a steady, fluid motion to allow the slow expansion of the muscle. If blood appeared in the syringe while aspirating, the needle was removed from the muscle and any bleeding was stopped by applying gentle pressure. A new needle/syringe was obtained and repeated at a new site either above or below the previous injection site. The needle was removed from the injection site. If necessary, gentle pressure was applied to stop any bleeding from the site. All bleeding was confirmed to have stopped and the animal was returned to its cage. Animals were continuously monitored until they achieved sternal recumbency and regained the righting reflex.

[0560] Subcutaneous injection (SQ/SC): To perform this procedure, the skin behind the neck (scruff) or over the flank was be lifted to form a “tent” and the needle was inserted, the plunger was pulled back to insure proper placement (no air or blood should be visible in the hub), and the solution was injected.

### Monitoring of Animals

[0561] There was a possibility of inflammatory side effects related to induction of immune response (discomfort, pain at the site of injection). Animals could have been less active and have had a hunched appearance following the initial immunization where Complete Freund's adjuvant was used. However, animals were expected to return to normal after 24 hrs. These animals were not be treated for the transient distress. Any treatment that diminished the effects of antigen/Complete Adjuvant interfered with the production of a strong immune response. Mice were checked 2× daily for the first week (except weekends) and then 1× daily afterwards (except weekends) to observe any negative side effects. Mice were weighed daily for the first week and then 2× weekly afterwards (except weekends and holidays) to observe any body weight loss.

[0562] IM injections can lead to pain, muscle damage, and muscle necrosis at the injection site. There is also a possibility of irritation or inflammation of the nerves near the injection site, resulting in lameness and self-mutilation of the affected area. Mice were anesthetized with isoflurane for the procedure to minimize pain and discomfort. Minimal volume was dosed to avoid causing tissue damage. Animals will be monitored daily for the first two weeks (except weekends) to observe any adverse effects.

### Vaccine Studies: RBD-Anchor Expressing Bacteria

[0563] C57BL/6 mice were dosed with RBDS1-HIS in CFA, SYN094 (negative control), SYN4740 (bacterial control, auxotrophy). SYN7598 (SYNB1891-OmpA-FLAG-RBD2-HIS; no STING ligand expression), SYN7563 (SYNB1891-Intimin-RBDSD1×3; no STING ligand expression), and SYN7442 (WT-Intimin-RBDSD1×3, no STING ligand expression; no auxotrophy) (FIGS. 13A-13D). Bacterial dose was at 1e8 total cells administered subcutaneously (SC), intranasally (IN), or intramuscularly (IM). Serum (FIGS. 13A and 13C) and BALF (FIGS. 13B and 13D) samples were tested for RBDS1-specific IgG titer (FIGS. 13A and 13B) and RBDS1-specific IgA (FIGS. 13C and 13D) titer.

[0564] SYN7598 had viability approximately 31% and displayed RBD, which did not bind to ACE2. SYN7563 had viability of approximately 13% and displayed RBD, which did bind to ACE2. SYN7442 had 0% viability and displayed RBD, which did bind to ACE2.

[0565] SYN7598 (BRO7) and SYN7563 (BRO8) showed increased stimulation of both IgG and IgA RBD-antibodies in both serum and BALF after intranasal and intramuscular administration when compared to the control (FIGS. 13A-13D). SYN7598 showed an increase of about 10-fold and 310-fold increase of IgG antibodies in serum compared to SYN4740 when administered intranasally and intramuscularly, respectively. SYN7598 showed an increase of about 31-fold and 125-fold increase of IgA antibodies in serum compared to SYN4740 when administered intranasally and intramuscularly, respectively. SYN7563 showed an increase of about 9-fold and 1450-fold increase of IgG antibodies in serum compared to SYN4740 when administered intranasally and intramuscularly, respectively. SYN7563 showed an increase of about 64-fold and 120-fold increase of IgA antibodies in serum compared to SYN4740 when administered intranasally and intramuscularly, respectively. SYN7598 showed an increase of about 1.5-fold and 8-fold increase of IgG antibodies in BALF compared to SYN4740 when administered intranasally and intramuscularly, respectively. SYN7598 showed an increase of about 2.5-fold and 30-fold increase of IgA antibodies in BALF compared to SYN4740 when administered intranasally and intramuscularly, respectively. SYN7563 showed an increase of about 4.5-fold and 250-fold increase of IgG antibodies in BALF compared to SYN4740 when administered intranasally and intramuscularly, respectively. SYN7563 showed an increase of about 10-fold and 1050-fold increase of IgA antibodies in BALF compared to SYN4740 when administered intranasally and intramuscularly, respectively.

[0566] FIGS. 14A-14D show serum and Broncho alveolar fluid (BALF) samples were collected after week 5 when immunization was administered at day 1 and a boost was administered at week 4. Mice were dosed with EcN negative control and SYN7563 at a dose of 1e8 total cells subcutaneously (SC), intranasally (IN), or intramuscularly (IM). FIGS. 14A and 14B show RBDS1-specific IgG titer and RBDS1-specific IgA titer, respectively. Compared to the negative control, SYN7563 administered either intranasally or intramuscularly induced RBDS1-specific IgG and IgA expression by about 1.5-fold to about 2-fold in serum. RBDS1-specific IgG titer and RBDS1-specific IgA titer also increased in BALF samples after SYN7563 was administered intranasally or intramuscularly (FIGS. 14C and 14D).

[0567] FIG. 15 showed that, SYN7563 increased RBDS1-specific IgG antibodies in serum at least 2-fold when administered intranasally and at least 2.5-fold to about 3-fold when administered intramuscularly.

### Example 4: Sequences

TABLE 11
Exemplary Nucleotide Sequences

| Description | SEQ ID NO |
|---|---|
| LppOmpA | SEQ ID NO: 1447 |
| Intimin | SEQ ID NO: 1448 |
| IgAMEP | SEQ ID NO: 1449 |
| YiaT | SEQ ID NO: 1450 |
| RBD | SEQ ID NO: 1451 |
| LppOmpA-FLAG-GFP-His | SEQ ID NO: 1452 |
| LppOmpA-FLAG-scFV-His | SEQ ID NO: 1453 |
| Intimin-FLAG-aEGFRnb-His | SEQ ID NO: 1454 |
| Intimin-FLAG-RBDSD1-His | SEQ ID NO: 1455 |
| His-RBD2-FLAG-IgAMEP | SEQ ID NO: 1456 |
| Intimin-RBDSD1 x3 | SEQ ID NO: 1457 |
| Intimin-FLAG-RBDSD1x 2 | SEQ ID NO: 1458 |
| YiaT-FLAG-RBD2-His | SEQ ID NO: 1459 |
| Intimin-FLAG-RBD2-His | SEQ ID NO: 1460 |
| LppompA-FLAG-RBD2-His | SEQ ID NO: 1461 |

TABLE 12
Exemplary Amino Acid Sequences

| Description | SEQ ID NO |
|---|---|
| LlpOmpA | SEQ ID NO: 1462 |
| Intimin | SEQ ID NO: 1463 |
| IgAMEP | SEQ ID NO: 1464 |
| YiaT | SEQ ID NO: 1465 |
| RBD | SEQ ID NO: 1466 |
| LppOmpA-FLAG-GFP-His | SEQ ID NO: 1467 |
| LppOmpA-FLAG-scFV-His | SEQ ID NO: 1468 |
| Intimin-FLAG-aEGFRnb-His | SEQ ID NO: 1469 |
| Intimin-FLAG-RBDSD1-His | SEQ ID NO: 1470 |
| His-RBD2-FLAG-IgAMEP | SEQ ID NO: 1471 |
| Intimin-RBDSD1 x3 | SEQ ID NO: 1472 |
| Intimin-FLAG-RBDSD1x 2 | SEQ ID NO: 1473 |
| YiaT-FLAG-RBD2-His | SEQ ID NO: 1474 |
| Intimin-FLAG-RBD2-His | SEQ ID NO: 1475 |
| LppompA-FLAG-RBD2-His | SEQ ID NO: 1476 |

TABLE 13
Linkers

| SEQ ID NO. | Sequence |
|---|---|
| SEQ ID NO: 1477 | GGGGS |
| SEQ ID NO: 1478 | (GGGGS)x2 |
| SEQ ID NO: 1479 | (GGGGS)x3 |
| SEQ ID NO: 1480 | EAAAK |
| SEQ ID NO: 1481 | (EAAAK)x2 |
| SEQ ID NO: 1482 | (EAAAK)x3 |

1. A modified microorganism capable of displaying at least one viral antigen on its cell surface and, optionally, at least one immune modulator.

2. The modified microorganism of claim 1, wherein the viral antigen is a viral spike protein receptor binding domain (RBD) from SARS-CoV2.

3. The modified microorganism of any one of the previous claims, wherein the modified microorganism comprises a nucleic acid encoding a fusion protein, wherein the fusion protein comprises an anchor and the at least one viral antigen.

4. The modified microorganism of claim 3, wherein the anchor is selected from the group consisting of OmpA, Intimin, IgA, and YiaT.

5. The modified microorganism of claim 3 or claim 4, wherein the fusion protein further comprises i) a FLAG tag, ii) a linker, iii) a His tag, or iv) combinations of i)-iii).

6. The modified microorganism of claim 5, wherein the linker is selected from the group consisting of GGGGS (SEQ ID NO: 1477), (GGGGS)×2 (SEQ ID NO: 1478), (GGGGS)×3 (SEQ ID NO: 1479), EAAAK (SEQ ID NO: 1480), (EAAAK)×2 (SEQ ID NO: 1481), and (EAAAK)×3 (SEQ ID NO: 1482).

7. The modified microorganism of any one of claims 3-6, wherein the anchor comprises a nucleic acid sequence having at least 80%, 85%, 90%, 95%, or 100% identity to any one of SEQ ID NOs: 1447-1450.

8. The modified microorganism of any one of claims 3-7, wherein the anchor comprises an amino acid sequence having at least 80%, 85%, 90%, 95%, or 100% identity to any one of SEQ ID NOs: 1462-1465.

9. The modified microorganism of any one of the previous claims, wherein the viral antigen comprises a nucleic acid sequence having at least 80%, 85%, 90%, 95%, or 100% identity to SEQ ID NO: 1451.

10. The modified microorganism of any one of the previous claims, wherein the viral antigen comprises a nucleic acid sequence having at least 80%, 85%, 90%, 95%, or 100% identity to SEQ ID NO: 1466.

11. The modified microorganism of any one of claims 3-10, wherein the nucleic acid encoding the fusion protein comprises a nucleic acid sequence having at least 80%, 85%, 90%, 95%, or 100% identity to any one of SEQ ID NOs: 1452-1461.

12. The modified microorganism of any one of claims 3-11, wherein the fusion protein comprises an amino acid sequence having at least 80%, 85%, 90%, 95%, or 100% identity to any one of SEQ ID NOs: 1467-1476.

13. The modified microorganism of any one of claims 5-12, wherein the linker comprises a nucleic acid sequence having at least 95%, 97%, or 100% identity to any one of SEQ ID NOs: 1477-1482.

14. A composition comprising the modified microorganism of any one of the previous claims and, optionally, an immune modulator.

15. A pharmaceutically acceptable composition comprising the modified microorganism of any one of claims 1-13, or the composition of claim 14, and a pharmaceutically acceptable carrier.

16. A method of preventing and/or treating coronavirus disease 2019 (COVID-19) in a subject, the method comprising administering to the subject the pharmaceutically acceptable composition of claim 15, thereby preventing and/or treating COVID-19 in the subject.

17. A method of inducing and sustaining an immune response in a subject, the method comprising administering to the subject the pharmaceutically acceptable composition of claim 15, thereby inducing and sustaining the immune response in the subject.

18. A method of preventing and/or treating coronavirus disease 2019 (COVID-19) in a subject, the method comprising
administering a first modified microorganism to the subject, wherein the first modified microorganism is capable of displaying at least one viral antigen on its cell surface; and
administering a second modified microorganism to the subject, wherein the second modified microorganism is capable of producing an immune modulator,
thereby preventing and/or treating the COVID-19 in the subject.

19. A method of inducing and sustaining an immune response in a subject, the method comprising
administering a first modified microorganism to the subject, wherein the first modified microorganism is capable of displaying at least one viral antigen on its cell surface; and
administering a second modified microorganism to the subject, wherein the second modified microorganism is capable of producing an immune modulator,
thereby inducing and sustaining the immune response in the subject.

20. The modified microorganism of any one of claims 1-13, the composition of claim 14, the pharmaceutically acceptable composition of claim 15, or the method of any one of claims 16-19, wherein the immune modulator is a STING agonist.

21. The modified microorganism of any one of claims 1-13 or 20, wherein the viral antigen binds a cell surface receptor on a cell.

22. The modified microorganism of claim 21, wherein the cell surface receptor is angiotensin converting enzyme 2 (ACE2) receptor.

23. The modified microorganism of any one of claims 1-13 and 20-22, wherein at least 20%, at least 30%, at least 40%, at least 50%, at least 60%, at least 70%, or at least 80% of the viral antigen displayed on the cell surface bind angiotensin converting enzyme 2 (ACE2) receptor.

24. The composition of claim 14, wherein at least 20%, at least 30%, at least 40%, at least 50%, at least 60%, at least 70%, or at least 80% of the modified microorganisms in the composition display the at least one viral antigen on their cell surface.

25. The modified microorganism of claim 23, wherein the modified microorganism is capable of inducing production of antibodies against the viral antigen at least 2-fold, at least 5-fold, at least 10-fold, at least 20-fold, at least 50-fold, or at-least 100-fold when compared to an unmodified microorganism control.

26. The method of claim 15 or 16, wherein the modified microorganism is capable of inducing production of antibodies against the viral antigen at least 2-fold, at least 5-fold, at least 10-fold, at least 20-fold, at least 50-fold, or at-least 100-fold when compared to an unmodified microorganism control.

27. The method of claim 18 or 19, wherein the first modified microorganism is capable of inducing production of antibodies against the viral antigen at least 2-fold, at least 5-fold, at least 10-fold, at least 20-fold, at least 50-fold, or at-least 100-fold when compared to an unmodified microorganism control.

The application's sequence listing, which the Patent Office published only in electronic form, follows.

SEQUENCE LISTING (1482 sequences)

SEQ ID NO: 1 - protein, 447 aa, Artificial Sequence
  Description of Artificial Sequence: Synthetic polypeptide
  Heavy chain humanized
QVQLVQSGVEVKKPGASVKVSCKASGYTFTNYYMYWVRQAPGQGLEWMGGINPSNGGTNFNEKFKNRVTLTTDSSTTTAYMELKSLQFDDTAVYYCARRDYRFDMGFDYWGQGTTVTVSSASTKGPSVFPLAPCSRSTSESTAALGCLVKDYFPEPVTVSWNSGALTSGVHTFPAVLQSSGLYSLSSVVTVPSSSLGTKTYTCNVDHKPSNTKVDKRVESKYGPPCPPCPAPEFLGGPSVFLFPPKPKDTLMISRTPEVTCVVVDVSQEDPEVQFNWYVDGVEVHNAKTKPREEQFNSTYRVVSVLTVLHQDWLNGKEYKCKVSNKGLPSSIEKTISKAKGQPREPQVYTLPPSQEEMTKNQVSLTCLVKGFYPSDIAVEWESNGQPENNYKTTPPVLDSDGSFFLYSRLTVDKSRWQEGNVFSCSVMHEALHNHYTQKSLSLSLGK

SEQ ID NO: 2 - protein, 218 aa, Artificial Sequence
  Description of Artificial Sequence: Synthetic polypeptide
  Light chain humanized
EIVLTQSPATLSLSPGERATLSCRASKGVSTSGYSYLHWYQQKPGQAPRLLIYLASYLESGVPARFSGSGSGTDFTLTISSLEPEDFAVYYCQHSRDLPLTFGGGTKVEIKRTVAAPSVFIFPPSDEQLKSGTASVVCLLNNFYPREAKVQWKVDNALQSGNSQESVTEQDSKDSTYSLSSTLTLSKADYEKHKVYACEVTHQGLSSPVTKSFNRGEC

SEQ ID NO: 3 - protein, 440 aa, Artificial Sequence
  Description of Artificial Sequence: Synthetic polypeptide
  Heavy chain human monoclonal
QVQLVESGGGVVQPGRSLRLDCKASGITFSNSGMHWVRQAPGKGLEWVAVIWYDGSKRYYADSVKGRFTISRDNSKNTLFLQMNSLRAEDTAVYYCATNDDYWGQGTLVTVSSASTKGPSVFPLAPCSRSTSESTAALGCLVKDYFPEPVTVSWNSGALTSGVHTFPAVLQSSGLYSLSSVVTVPSSSLGTKTYTCNVDHKPSNTKVDKRVESKYGPPCPPCPAPEFLGGPSVFLFPPKPKDTLMISRTPEVTCVVVDVSQEDPEVQFNWYVDGVEVHNAKTKPREEQFNSTYRVVSVLTVLHQDWLNGKEYKCKVSNKGLPSSIEKTISKAKGQPREPQVYTLPPSQEEMTKNQVSLTCLVKGFYPSDIAVEWESNGQPENNYKTTPPVLDSDGSFFLYSRLTVDKSRWQEGNVFSCSVMHEALHNHYTQKSLSLSLGK

SEQ ID NO: 4 - protein, 214 aa, Artificial Sequence
  Description of Artificial Sequence: Synthetic polypeptide
  Light chain human monoclonal
EIVLTQSPATLSLSPGERATLSCRASQSVSSYLAWYQQKPGQAPRLLIYDASNRATGIPARFSGSGSGTDFTLTISSLEPEDFAVYYCQQSSNWPRTFGQGTKVEIKRTVAAPSVFIFPPSDEQLKSGTASVVCLLNNFYPREAKVQWKVDNALQSGNSQESVTEQDSKDSTYSLSSTLTLSKADYEKHKVYACEVTHQGLSSPVTKSFNRGEC

SEQ ID NO: 5 - protein, 448 aa, Artificial Sequence
  Description of Artificial Sequence: Synthetic polypeptide
  Ipilimumab, CTLA-4, Heavy chain
QVQLVESGGGVVQPGRSLRLSCAASGFTFSSYTMHWVRQAPGKGLEWVTFISYDGNNKYYADSVKGRFTISRDNSKNTLYLQMNSLRAEDTAIYYCARTGWLGPFDYWGQGTLVTVSSASTKGPSVFPLAPSSKSTSGGTAALGCLVKDYFPEPVTVSWNSGALTSGVHTFPAVLQSSGLYSLSSVVTVPSSSLGTQTYICNVNHKPSNTKVDKRVEPKSCDKTHTCPPCPAPELLGGPSVFLFPPKPKDTLMISRTPEVTCVVVDVSHEDPEVKFNWYVDGVEVHNAKTKPREEQYNSTYRVVSVLTVLHQDWLNGKEYKCKVSNKALPAPIEKTISKAKGQPREPQVYTLPPSRDELTKNQVSLTCLVKGFYPSDIAVEWESNGQPENNYKTTPPVLDSDGSFFLYSKLTVDKSRWQQGNVFSCSVMHEALHNHYTQKSLSLSPGK

SEQ ID NO: 6 - protein, 118 aa, Artificial Sequence
  Description of Artificial Sequence: Synthetic polypeptide
  Ipilimumab, CTLA-4, Heavy chain variable region
QVQLVESGGGVVQPGRSLRLSCAASGFTFSSYTMHWVRQAPGKGLEWVTFISYDGNNKYYADSVKGRFTISRDNSKNTLYLQMNSLRAEDTAIYYCARTGWLGPFDYWGQGTLVTVSS

SEQ ID NO: 7 - protein, 215 aa, Artificial Sequence
  Description of Artificial Sequence: Synthetic polypeptide
  Ipilimumab, CTLA-4, Light chain
EIVLTQSPGTLSLSPGERATLSCRASQSVGSSYLAWYQQKPGQAPRLLIYGAFSRATGIPDRFSGSGSGTDFTLTISRLEPEDFAVYYCQQYGSSPWTFGQGTKVEIKRTVAAPSVFIFPPSDEQLKSGTASVVCLLNNFYPREAKVQWKVDNALQSGNSQESVTEQDSKDSTYSLSSTLTLSKADYEKHKVYACEVTHQGLSSPVTKSFNRGEC

SEQ ID NO: 8 - protein, 108 aa, Artificial Sequence
  Description of Artificial Sequence: Synthetic polypeptide
  Ipilimumab, CTLA-4, Light chain variable region
EIVLTQSPGTLSLSPGERATLSCRASQSVGSSYLAWYQQKPGQAPRLLIYGAFSRATGIPDRFSGSGSGTDFTLTISRLEPEDFAVYYCQQYGSSPWTFGQGTKVEIK

SEQ ID NO: 9 - protein, 411 aa, Artificial Sequence
  Description of Artificial Sequence: Synthetic polypeptide
  Tremelimumab (CP675206), CTLA-4, Heavy chain
PGKGLEWVAVIWYDGSNKYYADSVKGRFTISRDNSKNTLYLQMNSLRAEDTAVYYCARDPRGATLYYYYYGMDVWGQGTTVTVSSASTKGPSVFPLAPCSRSTSESTAALGCLVKDYFPEPVTVSWNSGALTSGVHTFPAVLQSSGLYSLSSVVTVPSSNFGTQTYTCNVDHKPSNTKVDKTVERKCCVECPPCPAPPVAGPSVFLFPPKPKDTLMISRTPEVTCVVVDVSHEDPEVQFNWYVDGVEVHNAKTKPREEQFNSTFRVVSVLTVVHQDWLNGKEYKCKVSNKGLPAPIEKTISKTKGQPREPQVYTLPPSREEMTKNQVSLTCLVKGFYPSDIAVEWESNGQPENNYKTTPPMLDSDGSFFLYSKLTVDKSRWQQGNVFSCSVMHEALHNHYTQKSLSLSPGK

SEQ ID NO: 10 - protein, 214 aa, Artificial Sequence
  Description of Artificial Sequence: Synthetic polypeptide
  Tremelimumab (CP675206), CTLA-4, Light chain
DIQMTQSPSSLSASVGDRVTITCRASQSINSYLDWYQQKPGKAPKLLIYAASSLQSGVPSRFSGSGSGTDFTLTISSLQPEDFATYYCQQYYSTPFTFGPGTKVEIKRTVAAPSVFIFPPSDEQLKSGTASVVCLLNNFYPREAKVQWKVDNALQSGNSQESVTEQDSKDSTYSLSSTLTLSKADYEKHKVYACEVTHQGLSSPVTKSFNRGEC

SEQ ID NO: 11 - protein, 442 aa, Artificial Sequence
  Description of Artificial Sequence: Synthetic polypeptide
  PF-05082566, 4-1BB (CD137, TNFRSF9), Heavy chain
EVQLVQSGAEVKKPGESLRISCKGSGYSFSTYWISWVRQMPGKGLEWMGKIYPGDSYTNYSPSFQGQVTISADKSISTAYLQWSSLKASDTAMYYCARGYGIFDYWGQGTLVTVSSASTKGPSVFPLAPCSRSTSESTAALGCLVKDYFPEPVTVSWNSGALTSGVHTFPAVLQSSGLYSLSSVVTVPSSNFGTQTYTCNVDHKPSNTKVDKTVERKCCVECPPCPAPPVAGPSVFLFPPKPKDTLMISRTPEVTCVVVDVSHEDPEVQFNWYVDGVEVHNAKTKPREEQFNSTFRVVSVLTVVHQDWLNGKEYKCKVSNKGLPAPIEKTISKTKGQPREPQVYTLPPSREEMTKNQVSLTCLVKGFYPSDIAVEWESNGQPENNYKTTPPMLDSDGSFFLYSKLTVDKSRWQQGNVFSCSVMHEALHNHYTQKSLSLSPGK

SEQ ID NO: 12 - protein, 214 aa, Artificial Sequence
  Description of Artificial Sequence: Synthetic polypeptide
  PF-05082566, 4-1BB (CD137, TNFRSF9), Light chain
SYELTQPPSVSVSPGQTASITCSGDNIGDQYAHWYQQKPGQSPVLVIYQDKNRPSGIPERFSGSNSGNTATLTISGTQAMDEADYYCATYTGFGSLAVFGGGTKLTVLGQPKAAPSVTLFPPSSEELQANKATLVCLISDFYPGAVTVAWKADSSPVKAGVETTTPSKQSNNKYAASSYLSLTPEQWKSHRSYSCQVTHEGSTVEKTVAPTECS

SEQ ID NO: 13 - protein, 448 aa, Artificial Sequence
  Description of Artificial Sequence: Synthetic polypeptide
  Urelumab, 4-1BB (CD137, TNFRSF9), Heavy chain
QVQLQQWGAGLLKPSETLSLTCAVYGGSFSGYYWSWIRQSPEKGLEWIGEINHGGYVTYNPSLESRVTISVDTSKNQFSLKLSSVTAADTAVYYCARDYGPGNYDWYFDLWGRGTLVTVSSASTKGPSVFPLAPCSRSTSESTAALGCLVKDYFPEPVTVSWNSGALTSGVHTFPAVLQSSGLYSLSSVVTVPSSSLGTKTYTCNVDHKPSNTKVDKRVESKYGPPCPPCPAPEFLGGPSVFLFPPKPKDTLMISRTPEVTCVVVDVSQEDPEVQFNWYVDGVEVHNAKTKPREEQFNSTYRVVSVLTVLHQDWLNGKEYKCKVSNKGLPSSIEKTISKAKGQPREPQVYTLPPSQEEMTKNQVSLTCLVKGFYPSDIAVEWESNGQPENNYKTTPPVLDSDGSFFLYSRLTVDKSRWQEGNVFSCSVMHEALHNHYTQKSLSLSLGK

SEQ ID NO: 14 - protein, 216 aa, Artificial Sequence
  Description of Artificial Sequence: Synthetic polypeptide
  Urelumab, 4-1BB (CD137, TNFRSF9), Light chain
EIVLTQSPATLSLSPGERATLSCRASQSVSSYLAWYQQKPGQAPRLLIYDASNRATGIPARFSGSGSGTDFTLTISSLEPEDFAVYYCQQRSNWPPALTFCGGTKVEIKRTVAAPSVFIFPPSDEQLKSGTASVVCLLNNFYPREAKVQWKVDNALQSGNSQESVTEQDSKDSTYSLSSTLTLSKADYEKHKVYACEVTHQGLSSPVTKSFNRGEC

SEQ ID NO: 15 - protein, 117 aa, Artificial Sequence
  Description of Artificial Sequence: Synthetic polypeptide
  Anti-OX40 antibody (Providence Health and Services), CD134 (OX40), Heavy chain
EVQLVESGGGLVQPGGSLRLSCAASGFTFTNYGIHWIRQAPGKGLEWVASISPSGGLTYYRDSVKGRFTISRDDAKNSPYLQMNSLRAEDTAVYYCATGGEGIFDYWGQGTLVTVSS

SEQ ID NO: 16 - protein, 108 aa, Artificial Sequence
  Description of Artificial Sequence: Synthetic polypeptide
  Anti-OX40 antibody (Providence Health and Services), CD134 (OX40), Light chain
DIQMTQSPSSLSASVGDRVTITCRATQSIYNALAWYQQKPGKAPKLLIYNANTLHTGVPSRFSASGSGTDSTLTISSLQPEDFATYYCQQYYDYPLTFGGGTKVEIKR

SEQ ID NO: 17 - protein, 440 aa, Artificial Sequence; identical to SEQ ID NO: 3
  Description of Artificial Sequence: Synthetic polypeptide
  Nivolumab, PD-1, Heavy chain

SEQ ID NO: 18 - protein, 113 aa, Artificial Sequence [sequence omitted]

SEQ ID NO: 19 - protein, 214 aa, Artificial Sequence; identical to SEQ ID NO: 4
  Description of Artificial Sequence: Synthetic polypeptide
  Nivolumab, PD-1, Light chain

SEQ ID NO: 20 - protein, 107 aa, Artificial Sequence [sequence omitted]

SEQ ID NO: 21 - protein, 447 aa, Artificial Sequence
  Description of Artificial Sequence: Synthetic polypeptide
  Pidilizumab, PD-1, Heavy chain
QVQLVQSGSELKKPGASVKISCKASGYTFTNYGMNWVRQAPGQGLQWMGWINTDSGESTYAEEFKGRFVFSLDTSVNTAYLQITSLTAEDTGMYFCVRVGYDALDYWGQGTLVTVSSASTKGPSVFPLAPSSKSTSGGTAALGCLVKDYFPEPVTVSWNSGALTSGVHTFPAVLQSSGLYSLSSVVTVPSSSLGTQTYICNVNHKPSNTKVDKRVEPKSCDKTHTCPPCPAPELLGGPSVFLFPPKPKDTLMISRTPEVTCVVVDVSHEDPEVKFNWYVDGVEVHNAKTKPREEQYNSTYRVVSVLTVLHQDWLNGKEYKCKVSNKALPAPIEKTISKAKGQPREPQVYTLPPSREEMTKNQVSLTCLVKGFYPSDIAVEWESNGQPENNYKTTPPVLDSDGSFFLYSKLTVDKSRWQQGNVFSCSVMHEALHNHYTQKSLSLSPGK

SEQ ID NO: 22 - skipped

SEQ ID NO: 23 - protein, 213 aa, Artificial Sequence
  Description of Artificial Sequence: Synthetic polypeptide
  Pidilizumab, PD-1, Light chain
EIVLTQSPSSLSASVGDRVTITCSARSSVSYMHWFQQKPGKAPKLWIYRTSNLASGVPSRFSGSGSGTSYCLTINSLQPEDFATYYCQQRSSFPLTFGGGTKLEIKRTVAAPSVFIFPPSDEQLKSGTASVVCLLNNFYPREAKVQWKVDNALQSGNSQESVTEQDSKDSTYSLSSTLTLSKADYEKHKVYACEVTHQGLSSPVTKSFNRGEC

SEQ ID NO: 24 - skipped

SEQ ID NO: 25 - protein, 447 aa, Artificial Sequence; identical to SEQ ID NO: 1
  Description of Artificial Sequence: Synthetic polypeptide
  Pembrolizumab (MK-3475/SCH900475, lambrolizumab) PD-1, Heavy chain

SEQ ID NO: 26 - protein, 218 aa, Artificial Sequence; identical to SEQ ID NO: 2
  Description of Artificial Sequence: Synthetic polypeptide
  Pembrolizumab (MK-3475/SCH900475, lambrolizumab), PD-1, Light chain  Heavy chain variable region is described in as described in WO2009114335

SEQ ID NO: 27 - protein, 451 aa, Artificial Sequence
  Description of Artificial Sequence: Synthetic polypeptide
  Durvalumab (MEDI4736), PD-L1, Heavy chain
EVQLVESGGGLVQPGGSLRLSCAASGFTFSRYWMSWVRQAPGKGLEWVANIKQDGSEKYYVDSVKGRFTISRDNAKNSLYLQMNSLRAEDTAVYYCAREGGWFGELAFDYWGQGTLVTVSSASTKGPSVFPLAPSSKSTSGGTAALGCLVKDYFPEPVTVSWNSGALTSGVHTFPAVLQSSGLYSLSSVVTVPSSSLGTQTYICNVNHKPSNTKVDKRVEPKSCDKTHTCPPCPAPEFEGGPSVFLFPPKPKDTLMISRTPEVTCVVVDVSHEDPEVKFNWYVDGVEVHNAKTKPREEQYNSTYRVVSVLTVLHQDWLNGKEYKCKVSNKALPASIEKTISKAKGQPREPQVYTLPPSREEMTKNQVSLTCLVKGFYPSDIAVEWESNGQPENNYKTTPPVLDSDGSFFLYSKLTVDKSRWQQGNVFSCSVMHEALHNHYTQKSLSLSPGK

SEQ ID NO: 28 - protein, 215 aa, Artificial Sequence
  Description of Artificial Sequence: Synthetic polypeptide
  Durvalumab (MEDI4736), PD-L1, Light chain
EIVLTQSPGTLSLSPGERATLSCRASQRVSSSYLAWYQQKPGQAPRLLIYDASSRATGIPDRFSGSGSGTDFTLTISRLEPEDFAVYYCQQYGSLPWTFGQGTKVEIKRTVAAPSVFIFPPSDEQLKSGTASVVCLLNNFYPREAKVQWKVDNALQSGNSQESVTEQDSKDSTYSLSSTLTLSKADYEKHKVYACEVTHQGLSSPVTKSFNRGEC

SEQ ID NO: 29 - protein, 450 aa, Artificial Sequence
  Description of Artificial Sequence: Synthetic polypeptide
  Lirilumab, KIR, Heavy chain
QVQLVQSGAEVKKPGSSVKVSCKASGGTFSFYAISWVRQAPGQGLEWMGGFIPIFGAANYAQKFQGRVTITADESTSTAYMELSSLRSDDTAVYYCARIPSGSYYYDYDMDVWGQGTTVTVSSASTKGPSVFPLAPCSRSTSESTAALGCLVKDYFPEPVTVSWNSGALTSGVHTFPAVLQSSGLYSLSSVVTVPSSSLGTKTYTCNVDHKPSNTKVDKRVESKYGPPCPPCPAPEFLGGPSVFLFPPKPKDTLMISRTPEVTCVVVDVSQEDPEVQFNWYVDGVEVHNAKTKPREEQFNSTYRVVSVLTVLHQDWLNGKEYKCKVSNKGLPSSIEKTISKAKGQPREPQVYTLPPSQEEMTKNQVSLTCLVKGFYPSDIAVEWESNGQPENNYKTTPPVLDSDGSFFLYSRLTVDKSRWQEGNVFSCSVMHEALHNHYTQKSLSLSLGK

SEQ ID NO: 30 - protein, 214 aa, Artificial Sequence
  Description of Artificial Sequence: Synthetic polypeptide
  Lirilumab, KIR, Light chain
EIVLTQSPVTLSLSPGERATLSCRASQSVSSYLAWYQQKPGQAPRLLIYDASNRATGIPARFSGSGSGTDFTLTISSLEPEDFAVYYCQQRSNWMYTFGQGTKLEIKRTVAAPSVFIFPPSDEQLKSGTASVVCLLNNFYPREAKVQWKVDNALQSGNSQESVTEQDSKDSTYSLSSTLTLSKADYEKHKVYACEVTHQGLSSPVTKSFNRGEC

SEQ ID NO: 31 - protein, 447 aa, Artificial Sequence
  Description of Artificial Sequence: Synthetic polypeptide
  BMS-986016, LAG3, Heavy chain
QVQLQQWGAGLLKPSETLSLTCAVYGGSFSDYYWNWIRQPPGKGLEWIGEINHRGSTNSNPSLKSRVTLSLDTSKNQFSLKLRSVTAADTAVYYCAFGYSDYEYNWFDPWGQGTLVTVSSASTKGPSVFPLAPCSRSTSESTAALGCLVKDYFPEPVTVSWNSGALTSGVHTFPAVLQSSGLYSLSSVVTVPSSSLGTKTYTCNVDHKPSNTKVDKRVESKYGPPCPPCPAPEFLGGPSVFLFPPKPKDTLMISRTPEVTCVVVDVSQEDPEVQFNWYVDGVEVHNAKTKPREEQFNSTYRVVSVLTVLHQDWLNGKEYKCKVSNKGLPSSIEKTISKAKGQPREPQVYTLPPSQEEMTKNQVSLTCLVKGFYPSDIAVEWESNGQPENNYKTTPPVLDSDGSFFLYSRLTVDKSRWQEGNVFSCSVMHEALHNHYTQKSLSLSLGK

SEQ ID NO: 32 - protein, 214 aa, Artificial Sequence
  Description of Artificial Sequence: Synthetic polypeptide
  BMS986016, LAG3, Light chain
EIVLTQSPATLSLSPGERATLSCRASQSISSYLAWYQQKPGQAPRLLIYDASNRATGIPARFSGSGSGTDFTLTISSLEPEDFAVYYCQQRSNWPLTFGQGTNLEIKRTVAAPSVFIFPPSDEQLKSGTASVVCLLNNFYPREAKVQWKVDNALQSGNSQESVTEQDSKDSTYSLSSTLTLSKADYEKHKVYACEVTHQGLSSPVTKSFNRGEC

SEQ ID NO: 33 - protein, 450 aa, Artificial Sequence
  Description of Artificial Sequence: Synthetic polypeptide
  Avelumab (MSB0010718C), PD-L1, Heavy chain
EVQLLESGGGLVQPGGSLRLSCAASGFTFSSYIMMWVRQAPGKGLEWVSSIYPSGGITFYADTVKGRFTISRDNSKNTLYLQMNSLRAEDTAVYYCARIKLGTVTTVDYWGQGTLVTVSSASTKGPSVFPLAPSSKSTSGGTAALGCLVKDYFPEPVTVSWNSGALTSGVHTFPAVLQSSGLYSLSSVVTVPSSSLGTQTYICNVNHKPSNTKVDKKVEPKSCDKTHTCPPCPAPELLGGPSVFLFPPKPKDTLMISRTPEVTCVVVDVSHEDPEVKFNWYVDGVEVHNAKTKPREEQYNSTYRVVSVLTVLHQDWLNGKEYKCKVSNKALPAPIEKTISKAKGQPREPQVYTLPPSRDELTKNQVSLTCLVKGFYPSDIAVEWESNGQPENNYKTTPPVLDSDGSFFLYSKLTVDKSRWQQGNVFSCSVMHEALHNHYTQKSLSLSPGK

SEQ ID NO: 34 - protein, 216 aa, Artificial Sequence
  Description of Artificial Sequence: Synthetic polypeptide
  Avelumab (MSB0010718C), PD-L1, Light chain
QSALTQPASVSGSPGQSITISCTGTSSDVGGYNYVSWYQQHPGKAPKLMIYDVSNRPSGVSNRFSGSKSGNTASLTISGLQAEDEADYYCSSYTSSSTRVFGTGTKVTVLGQPKANPTVTLFPPSSEELQANKATLVCLISDFYPGAVTVAWKADGSPVKAGVETTKPSKQSNNKYAASSYLSLTPEQWKSHRSYSCQVTHEGSTVEKTVAPTECS

SEQ ID NO: 35 - protein, 448 aa, Artificial Sequence
  Description of Artificial Sequence: Synthetic polypeptide
  Atezolizumab (MPDL3280A, RG7446, RO5541267) PD-L1, Heavy chain
EVQLVESGGGLVQPGGSLRLSCAASGFTFSDSWIHWVRQAPGKGLEWVAWISPYGGSTYYADSVKGRFTISADTSKNTAYLQMNSLRAEDTAVYYCARRHWPGGFDYWGQGTLVTVSSASTKGPSVFPLAPSSKSTSGGTAALGCLVKDYFPEPVTVSWNSGALTSGVHTFPAVLQSSGLYSLSSVVTVPSSSLGTQTYICNVNHKPSNTKVDKKVEPKSCDKTHTCPPCPAPELLGGPSVFLFPPKPKDTLMISRTPEVTCVVVDVSHEDPEVKFNWYVDGVEVHNAKTKPREEQYASTYRVVSVLTVLHQDWLNGKEYKCKVSNKALPAPIEKTISKAKGQPREPQVYTLPPSREEMTKNQVSLTCLVKGFYPSDIAVEWESNGQPENNYKTTPPVLDSDGSFFLYSKLTVDKSRWQQGNVFSCSVMHEALHNHYTQKSLSLSPGK

SEQ ID NO: 36 - protein, 118 aa, Artificial Sequence [sequence omitted]

SEQ ID NO: 37 - protein, 214 aa, Artificial Sequence
  Description of Artificial Sequence: Synthetic polypeptide
  Atezolizumab (MPDL3280A, RG7446, RO5541267), PD-L1, Light chain
DIQMTQSPSSLSASVGDRVTITCRASQDVSTAVAWYQQKPGKAPKLLIYSASFLYSGVPSRFSGSGSGTDFTLTISSLQPEDFATYYCQQYLYHPATFGQGTKVEIKRTVAAPSVFIFPPSDEQLKSGTASVVCLLNNFYPREAKVQWKVDNALQSGNSQESVTEQDSKDSTYSLSSTLTLSKADYEKHKVYACEVTHQGLSSPVTKSFNRGEC

SEQ ID NO: 38 - protein, 108 aa, Artificial Sequence
  Description of Artificial Sequence: Synthetic polypeptide
  Atezolizumab (MPDL3280A, RG7446, RO5541267), PD-L1, Light chain variable region
DIQMTQSPSSLSASVGDRVTITCRASQDVSTAVAWYQQKPGKAPKLLIYSASFLYSGVPSRFSGSGSGTDFTLTISSLQPEDFATYYCQQYLYHPATFGQGTKVEIKR

SEQ ID NO: 39 - protein, 449 aa, Artificial Sequence
  Description of Artificial Sequence: Synthetic polypeptide
  Mogamulizumab, CCR4, Heavy chain
EVQLVESGGDLVQPGRSLRLSCAASGFIFSNYGMSWVRQAPGKGLEWVATISSASTYSYYPDSVKGRFTISRDNAKNSLYLQMNSLRVEDTALYYCGRHSDGNFAFGYWGQGTLVTVSSASTKGPSVFPLAPSSKSTSGGTAALGCLVKDYFPEPVTVSWNSGALTSGVHTFPAVLQSSGLYSLSSVVTVPSSSLGTQTYICNVNHKPSNTKVDKKVEPKSCDKTHTCPPCPAPELLGGPSVFLFPPKPKDTLMISRTPEVTCVVVDVSHEDPEVKFNWYVDGVEVHNAKTKPREEQYNSTYRVVSVLTVLHQDWLNGKEYKCKVSNKALPAPIEKTISKAKGQPREPQVYTLPPSRDELTKNQVSLTCLVKGFYPSDIAVEWESNGQPENNYKTTPPVLDSDGSFFLYSKLTVDKSRWQQGNVFSCSVMHEALHNHYTQKSLSLSPGK

SEQ ID NO: 40 - protein, 219 aa, Artificial Sequence
  Description of Artificial Sequence: Synthetic polypeptide
  Mogamulizumab, CCR4, Light chain
DVLMTQSPLSLPVTPGEPASISCRSSRNIVHINGDTYLEWYLQKPGQSPQLLIYKVSNRFSGVPDRFSGSGSGTDFTLKISRVEAEDVGVYYCFQGSLLPWTFGQGTKVEIKRTVAAPSVFIFPPSDEQLKSGTASVVCLLNNFYPREAKVQWKVDNALQSGNSQESVTEQDSKDSTYSLSSTLTLSKADYEKHKVYACEVTHQGLSSPVTKSFNRGEC

SEQ ID NO: 41 - protein, 452 aa, Artificial Sequence
  Description of Artificial Sequence: Synthetic polypeptide
  Varlilumab, CD27, Heavy chain
QVQLVESGGGVVQPGRSLRLSCAASGFTFSSYDMHWVRQAPGKGLEWVAVIWYDGSNKYYADSVKGRFTISRDNSKNTLYLQMNSLRAEDTAVYYCARGSGNWGFFDYWGQGTLVTVSSASTKGPSVFPLAPSSKSTSGGTAALGCLVKDYFPEPVTVSWNSGALTSGVHTFPAVLQSSGLYSLSSVVTVPSSSLGTQTYICNVNHKPSNTKVDKKVEPKSCDKTHTCPPCPAPELLGGPSVFLFPPKPKDTLMISRTPEVTCVVVDVSHEDPEVKFNWYVDGVEVHNAKTKPREEQYNSTYRVVSVLTVLHQDWLNGKEYKCKVSNKALPAPIEKTISKAKGQPREPQVYTLPPSRDELTKNQVSLTCLVKGFYPSDIAVEWESNGQPENNYKTTPPVLDSDGSFFLYSKLTVDKSRWQQGNVFSCSVMHEALHNHYTQKSLSLSPGKGSS

SEQ ID NO: 42 - protein, 214 aa, Artificial Sequence
  Description of Artificial Sequence: Synthetic polypeptide
  Varlilumab, CD27, Light chain
DIQMTQSPSSLSASVGDRVTITCRASQGISRWLAWYQQKPEKAPKSLIYAASSLQSGVPSRFSGSGSGTDFTLTISSLQPEDFATYYCQQYNTYPRTFGQGTKVEIKRTVAAPSVFIFPPSDEQLKSGTASVVCLLNNFYPREAKVQWKVDNALQSGNSQESVTEQDSKDSTYSLSSTLTLSKADYEKHKVYACEVTHQGLSSPVTKSFNRGEC

SEQ ID NO: 43 - protein, 451 aa, Artificial Sequence
  Description of Artificial Sequence: Synthetic polypeptide
  Ulocuplumab, CXCR4, Heavy chain
EVQLVESGGGLVQPGGSLRLSCAAAGFTFSSYSMNWVRQAPGKGLEWVSYISSRSRTIYYADSVKGRFTISRDNAKNSLYLQMNSLRDEDTAVYYCARDYGGQPPYYYYYGMDVWGQGTTVTVSSASTKGPSVFPLAPCSRSTSESTAALGCLVKDYFPEPVTVSWNSGALTSGVHTFPAVLQSSGLYSLSSVVTVPSSSLGTKTYTCNVDHKPSNTKVDKRVESKYGPPCPPCPAPEFLGGPSVFLFPPKPKDTLMISRTPEVTCVVVDVSQEDPEVQFNWYVDGVEVHNAKTKPREEQFNSTYRVVSVLTVLHQDWLNGKEYKCKVSNKGLPSSIEKTISKAKGQPREPQVYTLPPSQEEMTKNQVSLTCLVKGFYPSDIAVEWESNGQPENNYKTTPPVLDSDGSFFLYSRLTVDKSRWQEGNVFSCSVMHEALHNHYTQKSLSLSLG

SEQ ID NO: 44 - protein, 214 aa, Artificial Sequence
  Description of Artificial Sequence: Synthetic polypeptide
  Ulocuplumab, CXCR4, Light chain
DIQMTQSPSSLSASVGDRVTITCRASQGISSWLAWYQQKPEKAPKSLIYAASSLQSGVPSRFSGSGSGTDFTLTISSLQPEDFVTYYCQQYNSYPRTFGQGTKVEIKRTVAAPSVFIFPPSDEQLKSGTASVVCLLNNFYPREAKVQWKVDNALQSGNSQESVTEQDSKDSTYSLSSTLTLSKADYEKHKVYACEVTHQGLSSPVTKSFNRGEC

SEQ ID NO: 45 - protein, 450 aa, Artificial Sequence
  Description of Artificial Sequence: Synthetic polypeptide
  Bavituximab, Phosphatidyl Serine, Heavy chain
EVQLQQSGPELEKPGASVKLSCKASGYSFTGYNMNWVKQSHGKSLEWIGHIDPYYGDTSYNQKFRGKATLTVDKSSSTAYMQLKSLTSEDSAVYYCVKGGYYGHWYFDVWGAGTTVTVSSASTKGPSVFPLAPSSKSTSGGTAALGCLVKDYFPEPVTVSWNSGALTSGVHTFPAVLQSSGLYSLSSVVTVPSSSLGTQTYICNVNHKPSNTKVDKKVEPKSCDKTHTCPPCPAPELLGGPSVFLFPPKPKDTLMISRTPEVTCVVVDVSHEDPEVKFNWYVDGVEVHNAKTKPREEQYNSTYRVVSVLTVLHQDWLNGKEYKCKVSNKALPAPIEKTISKAKGQPREPQVYTLPPSRDELTKNQVSLTCLVKGFYPSDIAVEWESNGQPENNYKTTPPVLDSDGSFFLYSKLTVDKSRWQQGNVFSCSVMHEALHNHYTQKSLSLSPGK

SEQ ID NO: 46 - protein, 164 aa, Artificial Sequence
  Description of Artificial Sequence: Synthetic polypeptide
  Bavituxumab, Phosphatidyl Serine, Light chain
TSSLDSGVPKRFSGSRSGSDYSLTISSLESEDFVDYYCLQYVSSPPTFGAGTKLELKRADAAPSVFIFPPSDEQLKSGTASVVCLLNNFYPREAKVQWKVDNALQSGNSQESVTEQDSKDSTYSLSSTLTLSKADYEKHKVYACEVTHQGLSSPVTKSFNRGEC

SEQ ID NO: 47 - DNA, 7584 bp, Artificial Sequence
  Description of Artificial Sequence: Synthetic polynucleotide
  Tet-regulated Tryptophan operon
taagacccactttcacatttaagttgtttttctaatccgcatatgatcaattcaaggccgaataagaaggctggctctgcaccttggtgatcaaataattcgatagcttgtcgtaataatggcggcatactatcagtagtaggtgtttccctttcttctttagcgacttgatgctcttgatcttccaatacgcaacctaaagtaaaatgccccacagcgctgagtgcatataatgcattctctagtgaaaaaccttgttggcataaaaaggctaattgattttcgagagtttcatactgtttttctgtaggccgtgtacctaaatgtacttttgctccatcgcgatgacttagtaaagcacatctaaaacttttagcgttattacgtaaaaaatcttgccagctttccccttctaaagggcaaaagtgagtatggtgcctatctaacatctcaatggctaaggcgtcgagcaaagcccgcttattttttacatgccaatacaatgtaggctgctctacacctagcttctgggcgagtttacgggttgttaaaccttcgattccgacctcattaagcagctctaatgcgctgttaatcactttacttttatctaatctagacatcattaattcctaatttttgttgacactctatcattgatagagttattttaccactccctatcagtgatagagaaaagtgaactctagaaataattttgtttaactttaagaaggagatatacatatgcaaacacaaaaaccgactctcgaactgctaacctgcgaaggcgcttatcgcgacaacccgactgcgctttttcaccagttgtgtggggatcgtccggcaacgctgctgctggaatccgcagatatcgacagcaaagatgatttaaaaagcctgctgctggtagacagtgcgctgcgcattacagcattaagtgacactgtcacaatccaggcgctttccggcaatggagaagccctgttgacactactggataacgccttgcctgcgggtgtggaaaatgaacaatcaccaaactgccgcgtactgcgcttcccgcctgtcagtccactgctggatgaagacgcccgcttatgctccctttcggtttttgacgctttccgcttattacagaatctgttgaatgtaccgaaggaagaacgagaagcaatgttcttcggcggcctgttctcttatgaccttgtggcgggatttgaaaatttaccgcaactgtcagcggaaaatagctgccctgatttctgtttttatctcgctgaaacgctgatggtgattgaccatcagaaaaaaagcactcgtattcaggccagcctgtttgctccgaatgaagaagaaaaacaacgtctcactgctcgcctgaacgaactacgtcagcaactgaccgaagccgcgccgccgctgccggtggtttccgtgccgcatatgcgttgtgaatgtaaccagagcgatgaagagttcggtggtgtagtgcgtttgttgcaaaaagcgattcgcgccggagaaattttccaggtggtgccatctcgccgtttctctctgccctgcccgtcaccgctggcagcctattacgtgctgaaaaagagtaatcccagcccgtacatgttttttatgcaggataatgatttcaccctgtttggcgcgtcgccggaaagttcgctcaagtatgacgccaccagccgccagattgagatttacccgattgccggaacacgtccacgcggtcgtcgtgccgatggttcgctggacagagacctcgacagccgcatcgaactggagatgcgtaccgatcataaagagctttctgaacatctgatgctggtggatctcgcccgtaatgacctggcacgcatttgcacacccggcagccgctacgtcgccgatctcaccaaagttgaccgttactcttacgtgatgcacctagtctcccgcgttgttggtgagctgcgccacgatctcgacgccctgcacgcttaccgcgcctgtatgaatatggggacgttaagcggtgcaccgaaagtacgcgctatgcagttaattgccgaagcagaaggtcgtcgacgcggcagctacggcggcgcggtaggttattttaccgcgcatggcgatctcgacacctgcattgtgatccgctcggcgctggtggaaaacggtatcgccaccgtgcaagccggtgctggcgtagtccttgattctgttccgcagtcggaagccgacgaaactcgtaataaagcccgcgctgtactgcgcgctattgccaccgcgcatcatgcacaggagacgttctaatggctgacattctgctgctcgataatatcgactcttttacgtacaacctggcagatcagttgcgcagcaatggtcataacgtggtgatttaccgcaaccatattccggcgcagaccttaattgaacgcctggcgacgatgagcaatccggtgctgatgctttctcctggccccggtgtgccgagcgaagccggttgtatgccggaactcctcacccgcttgcgtggcaagctgccaattattggcatttgcctcggacatcaggcgattgtcgaagcttacgggggctatgtcggtcaggcgggcgaaattcttcacggtaaagcgtcgagcattgaacatgacggtcaggcgatgtttgccggattaacaaacccgctgccagtggcgcgttatcactcgctggttggcagtaacattccggccggtttaaccatcaacgcccattttaatggcatggtgatggcggtgcgtcacgatgcagatcgcgtttgtggattccagttccatccggaatccattcttactacccagggcgctcgcctgctggaacaaacgctggcctgggcgcagcagaaactagagccaaccaacacgctgcaaccgattctggaaaaactgtatcaggcacagacgcttagccaacaagaaagccaccagctgttttcagcggtggtacgtggcgagctgaagccggaacaactggcggcggcgctggtgagcatgaaaattcgcggtgaacacccgaacgagatcgccggggcagcaaccgcgctactggaaaacgccgcgccattcccgcgcccggattatctgtttgccgatatcgtcggtactggcggtgacggcagcaacagcatcaatatttctaccgccagtgcgtttgtcgccgcggcctgcgggctgaaagtggcgaaacacggcaaccgtagcgtctccagtaaatccggctcgtcggatctgctggcggcgttcggtattaatcttgatatgaacgccgataaatcgcgccaggcgctggatgagttaggcgtctgtttcctctttgcgccgaagtatcacaccggattccgccatgcgatgccggttcgccagcaactgaaaacccgcactctgttcaacgtgctgggaccattgattaacccggcgcatccgccgctggcgctaattggtgtttatagtccggaactggtgctgccgattgccgaaaccttgcgcgtgctggggtatcaacgcgcggcagtggtgcacagcggcgggatggatgaagtttcattacacgcgccgacaatcgttgccgaactacatgacggcgaaattaagagctatcaattgaccgctgaagattttggcctgacaccctaccaccaggagcaattggcaggcggaacaccggaagaaaaccgtgacattttaacacgcttgttacaaggtaaaggcgacgccgcccatgaagcagccgtcgcggcgaatgtcgccatgttaatgcgcctgcatggccatgaagatctgcaagccaatgcgcaaaccgttcttgaggtactgcgcagtggttccgcttacgacagagtcaccgcactggcggcacgagggtaaatgatgcaaaccgttttagcgaaaatcgtcgcagacaaggcgatttgggtagaaacccgcaaagagcagcaaccgctggccagttttcagaatgaggttcagccgagcacgcgacatttttatgatgcacttcagggcgcacgcacggcgtttattctggagtgtaaaaaagcgtcgccgtcaaaaggcgtgatccgtgatgatttcgatccggcacgcattgccgccatttataaacattacgcttcggcaatttcagtgctgactgatgagaaatattttcaggggagctttgatttcctccccatcgtcagccaaatcgccccgcagccgattttatgtaaagacttcattatcgatccttaccagatctatctggcgcgctattaccaggccgatgcctgcttattaatgctttcagtactggatgacgaacaatatcgccagcttgcagccgtcgcccacagtctggagatgggtgtgctgaccgaagtcagtaatgaagaggaactggagcgcgccattgcattgggggcaaaggtcgttggcatcaacaaccgcgatctgcgcgatttgtcgattgatctcaaccgtacccgcgagcttgcgccgaaactggggcacaacgtgacggtaatcagcgaatccggcatcaatacttacgctcaggtgcgcgagttaagccacttcgctaacggctttctgattggttcggcgttgatggcccatgacgatttgaacgccgccgtgcgtcgggtgttgctgggtgagaataaagtatgtggcctgacacgtgggcaagatgctaaagcagcttatgacgcgggcgcgatttacggtgggttgatttttgttgcgacatcaccgcgttgcgtcaacgttgaacaggcgcaggaagtgatggctgcagcaccgttgcagtatgttggcgtgttccgcaatcacgatattgccgatgtggcggacaaagctaaggtgttatcgctggcggcagtgcaactgcatggtaatgaagatcagctgtatatcgacaatctgcgtgaggctctgccagcacacgtcgccatctggaaggctttaagtgtcggtgaaactcttcccgcgcgcgattttcagcacatcgataaatatgtattcgacaacggtcagggcgggagcggacaacgtttcgactggtcactattaaatggtcaatcgcttggcaacgttctgctggcggggggcttaggcgcagataactgcgtggaagcggcacaaaccggctgcgccgggcttgattttaattctgctgtagagtcgcaaccgggtatcaaagacgcacgtcttttggcctcggttttccagacgctgcgcgcatattaaggaaaggaacaatgacaacattacttaacccctattttggtgagtttggcggcatgtacgtgccacaaatcctgatgcctgctctgcgccagctggaagaagcttttgtcagcgcgcaaaaagatcctgaatttcaggctcagttcaacgacctgctgaaaaactatgccgggcgtccaaccgcgctgaccaaatgccagaacattacagccgggacgaacaccacgctgtatctgaagcgcgaagatttgctgcacggcggcgcgcataaaactaaccaggtgctcggtcaggctttactggcgaagcggatgggtaaaactgaaattattgccgaaaccggtgccggtcagcatggcgtggcgtcggcccttgccagcgccctgctcggcctgaaatgccgaatttatatgggtgccaaagacgttgaacgccagtcgcccaacgttttccggatgcgcttaatgggtgcggaagtgatcccggtacatagcggttccgcgaccctgaaagatgcctgtaatgaggcgctacgcgactggtccggcagttatgaaaccgcgcactatatgctgggtaccgcagctggcccgcatccttacccgaccattgtgcgtgagtttcagcggatgattggcgaagaaacgaaagcgcagattctggaaagagaaggtcgcctgccggatgccgttatcgcctgtgttggcggtggttcgaatgccatcggtatgtttgcagatttcatcaacgaaaccgacgtcggcctgattggtgtggagcctggcggccacggtatcgaaactggcgagcacggcgcaccgttaaaacatggtcgcgtgggcatctatttcggtatgaaagcgccgatgatgcaaaccgaagacgggcaaattgaagagtcttactccatttctgccgggctggatttcccgtccgtcggcccgcaacatgcgtatctcaacagcactggacgcgctgattacgtgtctattaccgacgatgaagccctggaagcctttaaaacgctttgcctgcatgaagggatcatcccggcgctggaatcctcccacgccctggcccatgcgctgaaaatgatgcgcgaaaatccggaaaaagagcagctactggtggttaacctttccggtcgcggcgataaagacatcttcaccgttcacgatattttgaaagcacgaggggaaatctgatggaacgctacgaatctctgtttgcccagttgaaggagcgcaaagaaggcgcattcgttcctttcgtcaccctcggtgatccgggcattgagcagtcgttgaaaattatcgatacgctaattgaagccggtgctgacgcgctggagttaggcatccccttctccgacccactggcggatggcccgacgattcaaaacgccacactgcgtgcttttgcggcgggagtaaccccggcgcagtgctttgagatgctggcactcattcgccagaagcacccgaccattcccatcggccttttgatgtatgccaacctggtgtttaacaaaggcattgatgagttttatgccgagtgcgagaaagtcggcgtcgattcggtgctggttgccgatgtgcccgtggaagagtccgcgcccttccgccaggccgcgttgcgtcataatgtcgcacctatctttatttgcccgccgaatgccgacgatgatttgctgcgccagatagcctcttacggtcgtggttacacctatttgctgtcgcgagcgggcgtgaccggcgcagaaaaccgcgccgcgttacccctcaatcatctggttgcgaagctgaaagagtacaacgctgcgcctccattgcagggatttggtatttccgccccggatcaggtaaaagccgcgattgatgcaggagctgcgggcgcgatttctggttcggccatcgttaaaatcatcgagcaacatattaatgagccagagaaaatgctggcggcactgaaagcttttgtacaaccgatgaaagcggcgacgcgcagttaatacgcatggcatggatgaccgatggtagtgtggggtctccccatgcgagagtagggaactgccaggcatcaaataaaacgaaaggctcagtcgaaagactgggcctttcgttttatctgttgtttgtcggtgaacgctctcctgagtaggacaaatccgccgggagcggatttgaacgttgcgaagcaacggcccggagggtggcgggcaggacgcccgccataaactgccaggcatcaaattaagcagaaggccatcctgacggatggcctttttgcgtggccagtgccaagcttgcatgcgtgc

SEQ ID NO: 48 - DNA, 623 bp, Artificial Sequence
  Description of Artificial Sequence: Synthetic polynucleotide
  Tet repressor
taagacccactttcacatttaagttgtttttctaatccgcatatgatcaattcaaggccgaataagaaggctggctctgcaccttggtgatcaaataattcgatagcttgtcgtaataatggcggcatactatcagtagtaggtgtttccctttcttctttagcgacttgatgctcttgatcttccaatacgcaacctaaagtaaaatgccccacagcgctgagtgcatataatgcattctctagtgaaaaaccttgttggcataaaaaggctaattgattttcgagagtttcatactgtttttctgtaggccgtgtacctaaatgtacttttgctccatcgcgatgacttagtaaagcacatctaaaacttttagcgttattacgtaaaaaatcttgccagctttccccttctaaagggcaaaagtgagtatggtgcctatctaacatctcaatggctaaggcgtcgagcaaagcccgcttattttttacatgccaatacaatgtaggctgctctacacctagcttctgggcgagtttacgggttgttaaaccttcgattccgacctcattaagcagctctaatgcgctgttaatcactttacttttatctaatctagacat

SEQ ID NO: 49 - DNA, 124 bp, Artificial Sequence
  Description of Artificial Sequence: Synthetic polynucleotide
  tetR/tetA promoters and RBS and leader region
cattaattcctaatttttgttgacactctatcattgatagagttattttaccactccctatcagtgatagagaaaagtgaactctagaaataattttgtttaactttaagaaggagatatacat

SEQ ID NO: 50 - DNA, 1562 bp, Artificial Sequence
  Description of Artificial Sequence: Synthetic polynucleotide
  trpE
atgcaaacacaaaaaccgactctcgaactgctaacctgcgaaggcgcttatcgcgacaacccgactgcgctttttcaccagttgtgtggggatcgtccggcaacgctgctgctggaatccgcagatatcgacagcaaagatgatttaaaaagcctgctgctggtagacagtgcgctgcgcattacagcattaagtgacactgtcacaatccaggcgctttccggcaatggagaagccctgttgacactactggataacgccttgcctgcgggtgtggaaaatgaacaatcaccaaactgccgcgtactgcgcttcccgcctgtcagtccactgctggatgaagacgcccgcttatgctccctttcggtttttgacgctttccgcttattacagaatctgttgaatgtaccgaaggaagaacgagaagcaatgttcttcggcggcctgttctcttatgaccttgtggcgggatttgaaaatttaccgcaactgtcagcggaaaatagctgccctgatttctgtttttatctcgctgaaacgctgatggtgattgaccatcagaaaaaaagcactcgtattcaggccagcctgtttgctccgaatgaagaagaaaaacaacgtctcactgctcgcctgaacgaactacgtcagcaactgaccgaagccgcgccgccgctgccggtggtttccgtgccgcatatgcgttgtgaatgtaaccagagcgatgaagagttcggtggtgtagtgcgtttgttgcaaaaagcgattcgcgccggagaaattttccaggtggtgccatctcgccgtttctctctgccctgcccgtcaccgctggcagcctattacgtgctgaaaaagagtaatcccagcccgtacatgttttttatgcaggataatgatttcaccctgtttggcgcgtcgccggaaagttcgctcaagtatgacgccaccagccgccagattgagatttacccgattgccggaacacgtccacgcggtcgtcgtgccgatggttcgctggacagagacctcgacagccgcatcgaactggagatgcgtaccgatcataaagagctttctgaacatctgatgctggtggatctcgcccgtaatgacctggcacgcatttgcacacccggcagccgctacgtcgccgatctcaccaaagttgaccgttactcttacgtgatgcacctagtctcccgcgttgttggtgagctgcgccacgatctcgacgccctgcacgcttaccgcgcctgtatgaatatggggacgttaagcggtgcaccgaaagtacgcgctatgcagttaattgccgaagcagaaggtcgtcgacgcggcagctacggcggcgcggtaggttattttaccgcgcatggcgatctcgacacctgcattgtgatccgctcggcgctggtggaaaacggtatcgccaccgtgcaagccggtgctggcgtagtccttgattctgttccgcagtcggaagccgacgaaactcgtaataaagcccgcgctgtactgcgcgctattgccaccgcgcatcatgcacaggagacgttcta

SEQ ID NO: 51 - DNA, 1596 bp, Artificial Sequence
  Description of Artificial Sequence: Synthetic polynucleotide
  trpD
atggctgacattctgctgctcgataatatcgactcttttacgtacaacctggcagatcagttgcgcagcaatggtcataacgtggtgatttaccgcaaccatattccggcgcagaccttaattgaacgcctggcgacgatgagcaatccggtgctgatgctttctcctggccccggtgtgccgagcgaagccggttgtatgccggaactcctcacccgcttgcgtggcaagctgccaattattggcatttgcctcggacatcaggcgattgtcgaagcttacgggggctatgtcggtcaggcgggcgaaattcttcacggtaaagcgtcgagcattgaacatgacggtcaggcgatgtttgccggattaacaaacccgctgccagtggcgcgttatcactcgctggttggcagtaacattccggccggtttaaccatcaacgcccattttaatggcatggtgatggcggtgcgtcacgatgcagatcgcgtttgtggattccagttccatccggaatccattcttactacccagggcgctcgcctgctggaacaaacgctggcctgggcgcagcagaaactagagccaaccaacacgctgcaaccgattctggaaaaactgtatcaggcacagacgcttagccaacaagaaagccaccagctgttttcagcggtggtacgtggcgagctgaagccggaacaactggcggcggcgctggtgagcatgaaaattcgcggtgaacacccgaacgagatcgccggggcagcaaccgcgctactggaaaacgccgcgccattcccgcgcccggattatctgtttgccgatatcgtcggtactggcggtgacggcagcaacagcatcaatatttctaccgccagtgcgtttgtcgccgcggcctgcgggctgaaagtggcgaaacacggcaaccgtagcgtctccagtaaatccggctcgtcggatctgctggcggcgttcggtattaatcttgatatgaacgccgataaatcgcgccaggcgctggatgagttaggcgtctgtttcctctttgcgccgaagtatcacaccggattccgccatgcgatgccggttcgccagcaactgaaaacccgcactctgttcaacgtgctgggaccattgattaacccggcgcatccgccgctggcgctaattggtgtttatagtccggaactggtgctgccgattgccgaaaccttgcgcgtgctggggtatcaacgcgcggcagtggtgcacagcggcgggatggatgaagtttcattacacgcgccgacaatcgttgccgaactacatgacggcgaaattaagagctatcaattgaccgctgaagattttggcctgacaccctaccaccaggagcaattggcaggcggaacaccggaagaaaaccgtgacattttaacacgcttgttacaaggtaaaggcgacgccgcccatgaagcagccgtcgcggcgaatgtcgccatgttaatgcgcctgcatggccatgaagatctgcaagccaatgcgcaaaccgttcttgaggtactgcgcagtggttccgcttacgacagagtcaccgcactggcggcacgagggtaa

SEQ ID NO: 52 - DNA, 1359 bp, Artificial Sequence
  Description of Artificial Sequence: Synthetic polynucleotide
  trpC
atgcaaaccgttttagcgaaaatcgtcgcagacaaggcgatttgggtagaaacccgcaaagagcagcaaccgctggccagttttcagaatgaggttcagccgagcacgcgacatttttatgatgcacttcagggcgcacgcacggcgtttattctggagtgtaaaaaagcgtcgccgtcaaaaggcgtgatccgtgatgatttcgatccggcacgcattgccgccatttataaacattacgcttcggcaatttcagtgctgactgatgagaaatattttcaggggagctttgatttcctccccatcgtcagccaaatcgccccgcagccgattttatgtaaagacttcattatcgatccttaccagatctatctggcgcgctattaccaggccgatgcctgcttattaatgctttcagtactggatgacgaacaatatcgccagcttgcagccgtcgcccacagtctggagatgggtgtgctgaccgaagtcagtaatgaagaggaactggagcgcgccattgcattgggggcaaaggtcgttggcatcaacaaccgcgatctgcgcgatttgtcgattgatctcaaccgtacccgcgagcttgcgccgaaactggggcacaacgtgacggtaatcagcgaatccggcatcaatacttacgctcaggtgcgcgagttaagccacttcgctaacggctttctgattggttcggcgttgatggcccatgacgatttgaacgccgccgtgcgtcgggtgttgctgggtgagaataaagtatgtggcctgacacgtgggcaagatgctaaagcagcttatgacgcgggcgcgatttacggtgggttgatttttgttgcgacatcaccgcgttgcgtcaacgttgaacaggcgcaggaagtgatggctgcagcaccgttgcagtatgttggcgtgttccgcaatcacgatattgccgatgtggcggacaaagctaaggtgttatcgctggcggcagtgcaactgcatggtaatgaagatcagctgtatatcgacaatctgcgtgaggctctgccagcacacgtcgccatctggaaggctttaagtgtcggtgaaactcttcccgcgcgcgattttcagcacatcgataaatatgtattcgacaacggtcagggcgggagcggacaacgtttcgactggtcactattaaatggtcaatcgcttggcaacgttctgctggcggggggcttaggcgcagataactgcgtggaagcggcacaaaccggctgcgccgggcttgattttaattctgctgtagagtcgcaaccgggtatcaaagacgcacgtcttttggcctcggttttccagacgctgcgcgcatattaa

SEQ ID NO: 53 - DNA, 1194 bp, Artificial Sequence
  Description of Artificial Sequence: Synthetic polynucleotide
  trpB
atgacaacattacttaacccctattttggtgagtttggcggcatgtacgtgccacaaatcctgatgcctgctctgcgccagctggaagaagcttttgtcagcgcgcaaaaagatcctgaatttcaggctcagttcaacgacctgctgaaaaactatgccgggcgtccaaccgcgctgaccaaatgccagaacattacagccgggacgaacaccacgctgtatctgaagcgcgaagatttgctgcacggcggcgcgcataaaactaaccaggtgctcggtcaggctttactggcgaagcggatgggtaaaactgaaattattgccgaaaccggtgccggtcagcatggcgtggcgtcggcccttgccagcgccctgctcggcctgaaatgccgaatttatatgggtgccaaagacgttgaacgccagtcgcccaacgttttccggatgcgcttaatgggtgcggaagtgatcccggtacatagcggttccgcgaccctgaaagatgcctgtaatgaggcgctacgcgactggtccggcagttatgaaaccgcgcactatatgctgggtaccgcagctggcccgcatccttacccgaccattgtgcgtgagtttcagcggatgattggcgaagaaacgaaagcgcagattctggaaagagaaggtcgcctgccggatgccgttatcgcctgtgttggcggtggttcgaatgccatcggtatgtttgcagatttcatcaacgaaaccgacgtcggcctgattggtgtggagcctggcggccacggtatcgaaactggcgagcacggcgcaccgttaaaacatggtcgcgtgggcatctatttcggtatgaaagcgccgatgatgcaaaccgaagacgggcaaattgaagagtcttactccatttctgccgggctggatttcccgtccgtcggcccgcaacatgcgtatctcaacagcactggacgcgctgattacgtgtctattaccgacgatgaagccctggaagcctttaaaacgctttgcctgcatgaagggatcatcccggcgctggaatcctcccacgccctggcccatgcgctgaaaatgatgcgcgaaaatccggaaaaagagcagctactggtggttaacctttccggtcgcggcgataaagacatcttcaccgttcacgatattttgaaagcacgaggggaaatctga

SEQ ID NO: 54 - DNA, 807 bp, Artificial Sequence
  Description of Artificial Sequence: Synthetic polynucleotide
  trpA
atggaacgctacgaatctctgtttgcccagttgaaggagcgcaaagaaggcgcattcgttcctttcgtcaccctcggtgatccgggcattgagcagtcgttgaaaattatcgatacgctaattgaagccggtgctgacgcgctggagttaggcatccccttctccgacccactggcggatggcccgacgattcaaaacgccacactgcgtgcttttgcggcgggagtaaccccggcgcagtgctttgagatgctggcactcattcgccagaagcacccgaccattcccatcggccttttgatgtatgccaacctggtgtttaacaaaggcattgatgagttttatgccgagtgcgagaaagtcggcgtcgattcggtgctggttgccgatgtgcccgtggaagagtccgcgcccttccgccaggccgcgttgcgtcataatgtcgcacctatctttatttgcccgccgaatgccgacgatgatttgctgcgccagatagcctcttacggtcgtggttacacctatttgctgtcgcgagcgggcgtgaccggcgcagaaaaccgcgccgcgttacccctcaatcatctggttgcgaagctgaaagagtacaacgctgcgcctccattgcagggatttggtatttccgccccggatcaggtaaaagccgcgattgatgcaggagctgcgggcgcgatttctggttcggccatcgttaaaatcatcgagcaacatattaatgagccagagaaaatgctggcggcactgaaagcttttgtacaaccgatgaaagcggcgacgcgcagttaa

SEQ ID NO: 55 - protein, 520 aa, Artificial Sequence
  Description of Artificial Sequence: Synthetic polypeptide
  TrpE
MQTQKPTLELLTCEGAYRDNPTALFHQLCGDRPATLLLESADIDSKDDLKSLLLVDSALRITALSDTVTIQALSGNGEALLTLLDNALPAGVENEQSPNCRVLRFPPVSPLLDEDARLCSLSVFDAFRLLQNLLNVPKEEREAMFFGGLFSYDLVAGFENLPQLSAENSCPDFCFYLAETLMVIDHQKKSTRIQASLFAPNEEEKQRLTARLNELRQQLTEAAPPLPVVSVPHMRCECNQSDEEFGGVVRLLQKAIRAGEIFQVVPSRRFSLPCPSPLAAYYVLKKSNPSPYMFFMQDNDFTLFGASPESSLKYDATSRQIEIYPIAGTRPRGRRADGSLDRDLDSRIELEMRTDHKELSEHLMLVDLARNDLARICTPGSRYVADLTKVDRYSYVMHLVSRVVGELRHDLDALHAYRACMNMGTLSGAPKVRAMQLIAEAEGRRRGSYGGAVGYFTAHGDLDTCIVIRSALVENGIATVQAGAGVVLDSVPQSEADETRNKARAVLRAIATAHHAQETF

SEQ ID NO: 56 - protein, 531 aa, Artificial Sequence
  Description of Artificial Sequence: Synthetic polypeptide
  TrpD
MADILLLDNIDSFTYNLADQLRSNGHNVVIYRNHIPAQTLIERLATMSNPVLMLSPGPGVPSEAGCMPELLTRLRGKLPIIGICLGHQAIVEAYGGYVGQAGEILHGKASSIEHDGQAMFAGLTNPLPVARYHSLVGSNIPAGLTINAHFNGMVMAVRHDADRVCGFQFHPESILTTQGARLLEQTLAWAQQKLEPTNTLQPILEKLYQAQTLSQQESHQLFSAVVRGELKPEQLAAALVSMKIRGEHPNEIAGAATALLENAAPFPRPDYLFADIVGTGGDGSNSINISTASAFVAAACGLKVAKHGNRSVSSKSGSSDLLAAFGINLDMNADKSRQALDELGVCFLFAPKYHTGFRHAMPVRQQLKTRTLFNVLGPLINPAHPPLALIGVYSPELVLPIAETLRVLGYQRAAVVHSGGMDEVSLHAPTIVAELHDGEIKSYQLTAEDFGLTPYHQEQLAGGTPEENRDILTRLLQGKGDAAHEAAVAANVAMLMRLHGHEDLQANAQTVLEVLRSGSAYDRVTALAARG

SEQ ID NO: 57 - protein, 452 aa, Artificial Sequence
  Description of Artificial Sequence: Synthetic polypeptide
  TrpC
MQTVLAKIVADKAIWVETRKEQQPLASFQNEVQPSTRHFYDALQGARTAFILECKKASPSKGVIRDDFDPARIAAIYKHYASAISVLTDEKYFQGSFDFLPIVSQIAPQPILCKDFIIDPYQIYLARYYQADACLLMLSVLDDEQYRQLAAVAHSLEMGVLTEVSNEEELERAIALGAKVVGINNRDLRDLSIDLNRTRELAPKLGHNVTVISESGINTYAQVRELSHFANGFLIGSALMAHDDLNAAVRRVLLGENKVCGLTRGQDAKAAYDAGAIYGGLIFVATSPRCVNVEQAQEVMAAAPLQYVGVFRNHDIADVADKAKVLSLAAVQLHGNEDQLYIDNLREALPAHVAIWKALSVGETLPARDFQHIDKYVFDNGQGGSGQRFDWSLLNGQSLGNVLLAGGLGADNCVEAAQTGCAGLDFNSAVESQPGIKDARLLASVFQTLRAY

SEQ ID NO: 58 - protein, 397 aa, Artificial Sequence
  Description of Artificial Sequence: Synthetic polypeptide
  TrpB
MTTLLNPYFGEFGGMYVPQILMPALRQLEEAFVSAQKDPEFQAQFNDLLKNYAGRPTALTKCQNITAGTNTTLYLKREDLLHGGAHKTNQVLGQALLAKRMGKTEIIAETGAGQHGVASALASALLGLKCRIYMGAKDVERQSPNVFRMRLMGAEVIPVHSGSATLKDACNEALRDWSGSYETAHYMLGTAAGPHPYPTIVREFQRMIGEETKAQILEREGRLPDAVIACVGGGSNAIGMFADFINETDVGLIGVEPGGHGIETGEHGAPLKHGRVGIYFGMKAPMMQTEDGQIEESYSISAGLDFPSVGPQHAYLNSTGRADYVSITDDEALEAFKTLCLHEGIIPALESSHALAHALKMMRENPEKEQLLVVNLSGRGDKDIFTVHDILKARGEI

SEQ ID NO: 59 - protein, 268 aa, Artificial Sequence
  Description of Artificial Sequence: Synthetic polypeptide
  TrpA
MERYESLFAQLKERKEGAFVPFVTLGDPGIEQSLKIIDTLIEAGADALELGIPFSDPLADGPTIQNATLRAFAAGVTPAQCFEMLALIRQKHPTIPIGLLMYANLVFNKGIDEFYAECEKVGVDSVLVADVPVEESAPFRQAALRHNVAPIFICPPNADDDLLRQIASYGRGYTYLLSRAGVTGAENRAALPLNHLVAKLKEYNAAPPLQGFGISAPDQVKAAIDAGAAGAISGSAIVKIIEQHINEPEKMLAALKAFVQPMKAATRS

SEQ ID NO: 60 - protein, 350 aa, Artificial Sequence
  Description of Artificial Sequence: Synthetic polypeptide
  AroGfbr: feedback resistant 2-dehydro-3-deoxyphosphoheptonate aldolase from E. coli
MNYQNDDLRIKEIKELLPPVALLEKFPATENAANTVAHARKAIHKILKGNDDRLLVVIGPCSIHDPVAAKEYATRLLTLREELQDELEIVMRVYFEKPRTTVGWKGLINDPHMDNSFQINDGLRIARKLLLDINDSGLPAAGEFLDMITLQYLADLMSWGAIGARTTESQVHRELASGLSCPVGFKNGTDGTIKVAIDAINAAGAPHCFLSVTKWGHSAIVNTSGNGDCHIILRGGKEPNYSAKHVAEVKEGLNKAGLPAQVMIDFSHANSSKQFKKQMDVCTDVCQQIAGGEKAIIGVMVESHLVEGNQSLESGEPLAYGKSITDACIGWDDTDALLRQLASAVKARRG

SEQ ID NO: 61 - protein, 520 aa, Artificial Sequence
  Description of Artificial Sequence: Synthetic polypeptide
  TrpEfbr: feedback resistant anthranilate synthase component I from E. coli
MQTQKPTLELLTCEGAYRDNPTALFHQLCGDRPATLLLEFADIDSKDDLKSLLLVDSALRITALSDTVTIQALSGNGEALLTLLDNALPAGVENEQSPNCRVLRFPPVSPLLDEDARLCSLSVFDAFRLLQNLLNVPKEEREAMFFGGLFSYDLVAGFENLPQLSAENSCPDFCFYLAETLMVIDHQKKSTRIQASLFAPNEEEKQRLTARLNELRQQLTEAAPPLPVVSVPHMRCECNQSDEEFGGVVRLLQKAIRAGEIFQVVPSRRFSLPCPSPLAAYYVLKKSNPSPYMFFMQDNDFTLFGASPESSLKYDATSRQIEIYPIAGTRPRGRRADGSLDRDLDSRIELEMRTDHKELSEHLMLVDLARNDLARICTPGSRYVADLTKVDRYSYVMHLVSRVVGELRHDLDALHAYRACMNMGTLSGAPKVRAMQLIAEAEGRRRGSYGGAVGYFTAHGDLDTCIVIRSALVENGIATVQAGAGVVLDSVPQSEADETRNKARAVLRAIATAHHAQETF

SEQ ID NO: 62 - protein, 410 aa, Artificial Sequence
  Description of Artificial Sequence: Synthetic polypeptide
  SerA: 2-oxoglutarate reductase from E. coli Nissle
MAKVSLEKDKIKFLLVEGVHQKALESLRAAGYTNIEFHKGALDDEQLKESIRDAHFIGLRSRTHLTEDVINAAEKLVAIGCFCIGTNQVDLDAAAKRGIPVFNAPFSNTRSVAELVIGELLLLLRGVPEANAKAHRGVWNKLAAGSFEARGKKLGIIGYGHIGTQLGILAESLGMYVYFYDIENKLPLGNATQVQHLSDLLNMSDVVSLHVPENPSTKNMMGAKEISLMKPGSLLINASRGTVVDIPALCDALASKHLAGAAIDVFPTEPATNSDPFTSPLCEFDNVLLTPHIGGSTQEAQENIGLEVAGKLIKYSDNGSTLSAVNFPEVSLPLHGGRRLMHIHENRPGVLTALNKIFAEQGVNIAAQYLQTSAQMGYVVIDIEADEDVAEKALQAMKAIPGTIRARLLY

SEQ ID NO: 63 - protein, 410 aa, Artificial Sequence
  Description of Artificial Sequence: Synthetic polypeptide
  SerAfbr: feedback resistant 2-oxoglutarate reductase from E. coli Nissle
MAKVSLEKDKIKFLLVEGVHQKALESLRAAGYTNIEFHKGALDDEQLKESIRDAHFIGLRSRTHLTEDVINAAEKLVAIGCFCIGTNQVDLDAAAKRGIPVFNAPFSNTRSVAELVIGELLLLLRGVPEANAKAHRGVWNKLAAGSFEARGKKLGIIGYGHIGTQLGILAESLGMYVYFYDIENKLPLGNATQVQHLSDLLNMSDVVSLHVPENPSTKNMMGAKEISLMKPGSLLINASRGTVVDIPALCDALASKHLAGAAIDVFPTEPATNSDPFTSPLCEFDNVLLTPHIGGSTQEAQENIGLEVAGKLIKYSDNGSTLSAVNFPEVSLPLHGGRRLMHIAEARPGVLTALNKIFAEQGVNIAAQYLQTSAQMGYVVIDIEADEDVAEKALQAMKAIPGTIRARLLY

SEQ ID NO: 64 - protein, 471 aa, Artificial Sequence
  Description of Artificial Sequence: Synthetic polypeptide
  TnaA: tryptophanase from E. coli
MENFKHLPEPFRIRVIEPVKRTTRAYREEAIIKSGMNPFLLDSEDVFIDLLTDSGTGAVTQSMQAAMMRGDEAYSGSRSYYALAESVKNIFGYQYTIPTHQGRGAEQIYIPVLIKKREQEKGLDRSKMVAFSNYFFDTTQGHSQINGCTVRNVYIKEAFDTGVRYDFKGNFDLEGLERGIEEVGPNNVPYIVATITSNSAGGQPVSLANLKVMYSIAKKYDIPVVMDSARFAENAYFIKQREAEYKDWTIEQITRETYKYADMLAMSAKKDAMVPMGGLLCMKDDSFFDVYTECRTLCVVQEGFPTYGGLEGGAMERLAVGLYDGMNLDWLAYRIAQVQYLVDGLEEIGVVCQQAGGHAAFVDAGKLLPHIPADQFPAQALACELYKVAGIRAVEIGSFLLGRDPKTGKQLPCPAELLRLTIPRATYTQTHMDFIIEAFKHVKENAANIKGLTFTYEPKVLRHFTAKLKEV

SEQ ID NO: 65 - protein, 416 aa, Artificial Sequence
  Description of Artificial Sequence: Synthetic polypeptide
  Pseudomonas kynureninase, P83788
MTTRNDCLALDAQDSLAPLRQQFALPEGVIYLDGNSLGARPVAALARAQAVIAEEWGNGLIRSWNSAGWRDLSERLGNRLATLIGARDGEVVVTDTTSINLFKVLSAALRVQATRSPERRVIVTETSNFPTDLYIAEGLADMLQQGYTLRLVDSPEELPQAIDQDTAVVMLTHVNYKTGYMHDMQALTALSHECGALAIWDLAHSAGAVPVDLHQAGADYAIGCTYKYLNGGPGSQAFVWVSPQLCDLVPQPLSGWFGHSRQFAMEPRYEPSNGIARYLCGTQPITSLAMVECGLDVFAQTDMASLRRKSLALTDLFIELVEQRCAAHELTLVTPREHAKRGSHVSFEHPEGYAVIQALIDRGVIGDYREPRIMRFGFTPLYTTFTEVWDAVQILGEILDRKTWAQAQFQVRHSVT

SEQ ID NO: 66 - protein, 465 aa, Artificial Sequence
  Description of Artificial Sequence: Synthetic polypeptide
  Human, Q16719
MEPSSLELPADTVQRIAAELKCHPTDERVALHLDEEDKLRHFRECFYIPKIQDLPPVDLSLVNKDENAIYFLGNSLGLQPKMVKTYLEEELDKWAKIAAYGHEVGKRPWITGDESIVGLMKDIVGANEKEIALMNALTVNLHLLMLSFFKPTPKRYKILLEAKAFPSDHYAIESQLQLHGLNIEESMRMIKPREGEETLRIEDILEVIEKEGDSIAVILFSGVHFYTGQHFNIPAITKAGQAKGCYVGFDLAHAVGNVELYLHDWGVDFACWCSYKYLNAGAGGIAGAFIHEKHAHTIKPALVGWFGHELSTRFKMDNKLQLIPGVCGFRISNPPILLVCSLHASLEIFKQATMKALRKKSVLLTGYLEYLIKHNYGKDKAATKKPVVNIITPSHVEERGCQLTITFSVPNKDVFQELEKRGVVCDKRNPNGIRVAPVPLYNSFHDVYKFTNLLTSILDSAETKN

SEQ ID NO: 67 - protein, 378 aa, Artificial Sequence
  Description of Artificial Sequence: Synthetic polypeptide
  Shewanella, Q8E973
MLLNVKQDFCLAGPGYLLNHSVGRPLKSTEQALKQAFFAPWQESGREPWGQWLGVIDNFTAALASLFNGQPQDFCPQVNLSSALTKIVMSLDRLTRDLTRNGGAVVLMSEIDFPSMGFALKKALPASCELRFIPKSLDVTDPNVWDAHICDDVDLVFVSHAYSNTGQQAPLAQIISLARERGCLSLVDVAQSAGILPLDLAKLQPDFMIGSSVKWLCSGPGAAYLWVNPAILPECQPQDVGWFSHENPFEFDIHDFRYHPTALRFWGGTPSIAPYAIAAHSIEYFANIGSQVMREHNLQLMEPVVQALDNELVSPQEVDKRSGTIILQFGERQPQILAALAAANISVDTRSLGIRVSPHIYNDEADIARLLGVIKANR

SEQ ID NO: 68 - DNA, 1303 bp, Artificial Sequence
  Description of Artificial Sequence: Synthetic polynucleotide
  kynU (Pseudomonas)
atgacgacccgaaatgattgcctagcgttggatgcacaggacagtctggctccgctgcgccaacaatttgcgctgccggagggtgtgatatacctggatggcaattcgctgggcgcacgtccggtagctgcgctggctcgcgcgcaggctgtgatcgcagaagaatggggcaacgggttgatccgttcatggaactctgcgggctggcgtgatctgtctgaacgcctgggtaatcgcctggctaccctgattggtgcgcgcgatggggaagtagttgttactgataccacctcgattaatctgtttaaagtgctgtcagcggcgctgcgcgtgcaagctacccgtagcccggagcgccgtgttatcgtgactgagacctcgaatttcccgaccgacctgtatattgcggaagggttggcggatatgctgcaacaaggttacactctgcgtttggtggattcaccggaagagctgccacaggctatagatcaggacaccgcggtggtgatgctgacgcacgtaaattataaaaccggttatatgcacgacatgcaggctctgaccgcgttgagccacgagtgtggggctctggcgatttgggatctggcgcactctgctggcgctgtgccggtggacctgcaccaagcgggcgcggactatgcgattggctgcacgtacaaatacctgaatggcggcccgggttcgcaagcgtttgtttgggtttcgccgcaactgtgcgacctggtaccgcagccgctgtctggttggttcggccatagtcgccaattcgcgatggagccgcgctacgaaccttctaacggcattgctcgctatctgtgcggcactcagcctattactagcttggctatggtggagtgcggcctggatgtgtttgcgcagacggatatggcttcgctgcgccgtaaaagtctggcgctgactgatctgttcatcgagctggttgaacaacgctgcgctgcacacgaactgaccctggttactccacgtgaacacgcgaaacgcggctctcacgtgtcttttgaacaccccgagggttacgctgttattcaagctctgattgatcgtggcgtgatcggcgattaccgtgagccacgtattatgcgtttcggtttcactcctctgtatactacttttacggaagtttgggatgcagtacaaatcctgggcgaaatcctggatcgtaagacttgggcgcaggctcagtttcaggtgcgccactctgttacttaaaaataaaacgaaaggctcagtcgaaagactgggcctttcgttttatctgttg

SEQ ID NO: 69 - DNA, 1450 bp, Artificial Sequence
  Description of Artificial Sequence: Synthetic polynucleotide
  kynU(Human)
atggagccttcatctttagaactgccagcggacacggtgcagcgcatcgcggcggaactgaagtgccatccgactgatgagcgtgtggcgctgcatctggacgaagaagataaactgcgccactttcgtgaatgtttttatattcctaaaattcaagacttgccgccggtagatttgagtctcgttaacaaagatgaaaacgcgatctactttctgggcaactctctgggtctgcaaccaaaaatggttaaaacgtacctggaggaagaactggataaatgggcaaaaatcgcggcttatggtcacgaagtgggcaagcgtccttggattactggcgacgagtctattgtgggtttgatgaaagatattgtgggcgcgaatgaaaaggaaattgcactgatgaatgctctgaccgttaatctgcacctgctgatgctgtctttttttaaaccgaccccgaaacgctacaaaatactgctggaagcgaaagcgtttccgtcggatcactatgctatagaaagtcaactgcagttgcatggtctgaatatcgaggaatctatgcgcatgattaaaccgcgtgagggtgaagaaacgctgcgtattgaagacattctggaagttattgaaaaagaaggtgattctatcgcagttatactgttttctggcgtgcacttttatacaggtcagcacttcaatatcccggcaatcactaaagcggggcaggcaaaaggctgctatgttggttttgacctggcgcatgcagtggggaatgttgaactgtatctgcacgattggggcgttgatttcgcgtgttggtgtagctacaaatatctgaacgctggcgcgggtggcattgctggcgcttttattcacgaaaaacacgcgcacaccattaaaccggctctggttggctggttcggtcatgagctgagtactcgctttaaaatggataacaaactgcaattgattccgggtgtttgcggcttccgtatcagcaatccgccgattctgctggtttgcagcctgcacgctagtctggaaatctttaagcaggcgactatgaaagcgctgcgcaaaaaatctgtgctgctgaccggctatctggagtatctgatcaaacacaattatggcaaagataaagctgcaactaaaaaaccggtagtgaacattatcaccccctcacacgtggaggagcgcggttgtcagctgactattactttcagtgtacctaataaagatgtgttccaggaactggaaaaacgcggcgttgtttgtgataaacgtaacccgaatggtattcgcgtggctcctgtgccgctgtacaattcattccacgatgtttataaattcaccaacctgctgacttctattctcgacagtgctgagactaaaaattaaaaataaaacgaaaggctcagtcgaaagactgggcctttcgttttatctgttg

SEQ ID NO: 70 - DNA, 1189 bp, Artificial Sequence
  Description of Artificial Sequence: Synthetic polynucleotide
  kynU(Shewanella)
atgctgctgaatgtaaaacaggacttttgcctggcaggcccgggctacctgctgaatcactcggttggccgtccgctgaaatcaactgagcaagcgctgaaacaagcattttttgctccgtggcaagagagcggtcgtgaaccgtggggccagtggctgggtgttattgataatttcactgctgcgctggcatctctgtttaatggtcaaccgcaggatttttgtccgcaggttaacctgagcagcgcgctgactaaaattgtgatgtcactggatcgtctgactcgcgatctgacccgcaatggcggtgctgttgtgctgatgtctgaaatcgatttcccatctatgggcttcgcgttgaaaaaagcgctgccagcgagctgcgaactgcgttttatcccgaaaagtctggacgtgactgatccgaacgtatgggatgcacacatctgtgatgatgtagacctggtttttgtgtctcacgcctatagtaatacgggccaacaggctccgctggcgcaaatcatctctctggcgcgtgaacgtggctgcctgtcactggtggatgtagcgcaatcagcggggattttgccgctggatctggcgaaactgcaaccggacttcatgatcggcagttcggttaaatggctgtgctcgggccctggtgcggcatatctgtgggttaatccggcgattctgccggaatgtcagccgcaggatgtgggctggttttcacatgagaatccctttgaattcgacatccacgatttccgctaccacccgactgcactgcgcttttggggtggtacgccgtcgatcgcgccttatgcgatcgcggcgcactcgatcgaatattttgccaatatcggctcgcaagtgatgcgtgaacacaacctgcaactgatggaaccggtggttcaggcgctggacaatgaactggtgagcccgcaggaagtggataaacgctcaggcactattattctgcaattcggtgaacgtcaaccgcaaattctggcggctctggctgcggcgaacatttcggtggacactcgttctttggggattcgtgttagtccgcacatttataatgatgaggcggacattgcgcgcctgctgggtgtgatcaaagcaaatcgctaaaaataaaacgaaaggctcagtcgaaagactgggcctttcgttttatctgttg

SEQ ID NO: 71 - DNA, 1242 bp, Artificial Sequence
  Description of Artificial Sequence: Synthetic polynucleotide
  nupC (polynucleotide)
gtgcacggaaatttaacctgcctcatatttggagcaaatatggaccgcgtccttcattttgtactggcacttgccgttgttgcgattctcgcactgctggtaagcagcgaccgcaaaaaaattcgtatccgttatgttattcaactgcttgttatcgaagtgttactggcgtggttcttcctgaactccgacgttggtctgggcttcgtgaaaggcttctccgaaatgttcgaaaaactgctcggttttgccaacgaagggactaacttcgtctttggtagcatgaatgatcaaggcctggcattcttcttcctgaaagtgctgtgcccaatcgtctttatctctgcgctgatcggtattctccagcatattcgcgtattgccggtgattatccgcgcaattggtttcctgctctccaaagtcaacggcatgggcaaactggaatcctttaacgccgtcagctccctgattctgggtcagtctgaaaactttattgcctataaagatatcctcggcaaaatctcccgcaatcgtatgtacaccatggcagcaacggcgatgtccaccgtgtcgatgtccatcgttggtgcatatatgaccatgctggagccgaaatacgtcgttgcggcgctggtactgaacatgttcagcacctttatcgtgctgtcgctgatcaacccttaccgtgttgatgccagtgaagaaaacattcagatgtccaacctgcacgaaggtcagagcttcttcgaaatgctgggtgaatacattctggcaggtttcaaagttgccattatcgttgccgcgatgctgatcggctttatcgccctgatcgctgcactgaacgctctgtttgctaccgtgactggctggtttggctacagcatctccttccagggcatcctgggttacatcttctatccgattgcatgggtgatgggtgttccttccagtgaagcactgcaagtgggcagtatcatggcgaccaaactggtttccaacgagttcgttgcgatgatggatctgcagaaaattgcttccacgctctctccgcgtgcggaaggcatcatctctgtgttcctggtttccttcgctaacttctcttcaatcgggattatcgcgggtgcggttaaaggcctgaatgaagagcaaggtaacgtggtttctcgcttcggtctgaaactggtttacggctctaccctggtgagtgtgctgtctgcgtcaatcgcagcactggtgctgtaa

SEQ ID NO: 72 - DNA, 2259 bp, Artificial Sequence
  Description of Artificial Sequence: Synthetic polynucleotide
  xdhA
atgcgcgtcgatgccattgctaaggtcaccgggcgggcacgatatactgacgattatattatggcgggcatgtgttacgcgaaatatgtacgtagccctatcgcacatggttatgctgtaaatattaatgatgaacaagccaggagtttgccgggcgtcctggcgatttttacctgggaagatgtgccagaaatcccattcgccacggcagggcatgcctggacacttgacgaaaacaagcgcgataccgccgatcgtgccctgctaacgcgtcatgttcgtcatcatggtgacgccgttgccatcgtcgtggcccgcgatgaactcacggcagaaaaagcggcgcaattggtcagcattgagtggcaagaattacccgttatcacctcgccagaagcggcgctggcagaagacgctgcaccaatccataacggtggcaatttactgaaacaaagcacgatgtcgacgggtaatgtccaacaaacaatcgatgccgccgactaccaggtacaggggcactatcagactcccgttattcaacattgtcatatggaaagcgtgacatcgctggcatggatggaggatgactcgcgaattaccatcgtttccagcacccagatcccgcacattgttcgccgcgtggttggtcaggcgctggatattccctggtcatgcgtacgagtcatcaaaccgtttatcggtggcggttttggtaataaacaggatgtactggaagagccaatggcggcattcctgaccagcaaacttggcggcattccggtgaaagtttcccttagccgtgaagagtgtttcctcgcaacccgtacccgccacgcttttactattgacgggcaaatgggcgtgaaccgcgacggaacattgaaaggttatagtctggatgttctgtctaacaccggcgcttatgcatctcacgggcactccattgcttctgctggggggaataaagtcgcttacctttatcctcgttgtgcctacgcttacagttcaaagacctgctataccaacctcccctcggctggtgcgatgcgtggttatggcgcgccacaagtcgtatttgccgttgagtctatgcttgatgatgccgcgacagcgttaggtattgatcctgttgaaattcgtttacgcaacgccgcccgcgaaggagatgctaatccgctcacgggaaaacgtatttacagcgcagggttgccggagtgtcttgaaaaaggccggaaaatctttgaatgggaaaaacgccgtgcagagtgccagaaccagcaaggcaatttacgtcgtggcgttggcgtcgcctgttttagctacacctctaacacctggcctgtcggcgtagaaatagcaggcgcgcgcctgttgatgaatcaggatggaaccatcaacgtgcaaagcggcgcgacggaaatcggccagggtgccgacaccgtgttctcgcaaatggtggcagaaaccgtgggagttccggtcagcgatgttcacgttatttcaacccaagataccgacgttacaccattcgaccccggcgcatttgcctcacgtcagagctatgttgccgcgcctgcgctgcgcagtgcagcactgttattaaaagagaaaatcatcgctcacgccgcagtcatgctacatcagtcagcgatgaatctgaccctgataaaaggccatatcgtgctgattgaaagaccggaagaaccgttaatgtcgttaaaagatttggcgatggacgctttctaccaccctgaacgcggcgggcagctctctgccgaaagctccatcaaaaccaccactaacccaccggcgtttggctgtacctttgttgatctgacggtcgatattgcactgtgcaaagtcaccatcaaccgcatcctcaacgttcatgattcgggccatattcttaatccgctgctggcagaaggtcaggtacacggcggaatgggaatgggcattggctgggcgctatttgaagagatgatcatcgatgcgaaaagcggcgtggtccgtaaccccaatctgctggattacaaaatgccgaccatgccggatctgccacaactggaaagcgcgttcgtcgaaatcaatgagccgcaatcagcatacggacataagtcactgggtgagccccccataattcctgtagccgctgctattcgtaacgcggtgaagatggctaccggtgttgcaatcaatacactgccgctaacgccaaaacgattatatgaagaattccatctggcaggattgatttga

SEQ ID NO: 73 - DNA, 879 bp, Artificial Sequence
  Description of Artificial Sequence: Synthetic polynucleotide
  xdhB
atgtttgattttgcttcttaccatcgcgcaaccacccttgccgatgccatcaccctgctggctgacaatccgcaggccaaattgcttgccggtggcactgacgtactgatacagcttcaccatcacaatgaccgctatcgccatattgttgatatccacaatctggcagagcttcagggaataacacaggcggaagatggcgcgctgcgaatcggctctgcgacaacatttactcagctcattgaagatcccgtaatccaacgcaatctcccggcgttatgtgctgcggctgcatcaatcgccgggccgcagatccgtaatgtcgccacctacggcggaaatatttgcaacggtgccaccagcgcagattctgccacgccaacgctaatttatgacgcgaaactggagctccactccccacgcggtgttcgtttcgtcccgattaatggctttcacaccgggccgggcaaagtgtctcttgagcatgacgaaatccttgtcgcctttcattttccgccacagccgaaagaacacgcgggcagcgcgcattttaaatatgccatgcgcgacgcaatggatatttcaacaattggctgcgccgcacattgccgactggataacggcaatttcagcgaattacgcctggcatttggtgttgccgcgccaacgccgattcgctgccaacatgccgaacagactgcacaaaatgcgccattaaacctgcaaacgctggaagccatcagcgaatcagtcctgcaagatgtcgccccgcgttcttcatggcgggccagtaaagagtttcgtctgcatctcatccagacgatgaccaaaaaagtgattagcgaagccgtcgccgcggcggggggaaaattgcaatga

SEQ ID NO: 74 - DNA, 480 bp, Artificial Sequence
  Description of Artificial Sequence: Synthetic polynucleotide
  xdhC
atgaatcacagcgaaacaattaccatcgaatgcaccattaacgggatgccttttcagcttcacgccgcgccaggaatgccgctttcggaactactccgagaacaagggcttcttagtgtcaaacaaggttgctgcgtaggcgaatgcggtgcctgtacggtgctggtcgacggcactgcgatagacagttgcttattccttgcgacctgggctgaaggaaaagagatccgcacgctggaaggtgaagcgaaaggcggtaaactttctcatgtccaactggcttatgcgaaatctggtgcagtgcaatgcgggttttgtacgccgggcctgattatggctaccacggcgatgctggcaaaaccacgcgaaaaaccattaaccattacggaaattcgtcgtggactggcgggaaatctttgtcgctgcacggggtatcagatgattgtaaatacagttctggattgcgagaaaacgaagtaa

SEQ ID NO: 75 - DNA, 1002 bp, Artificial Sequence
  Description of Artificial Sequence: Synthetic polynucleotide
  Add
atgattgataccaccctgccattaactgatatccatcgccaccttgatggcaacattcgtccccagaccattcttgaacttggccgccagtataatatctcgcttcctgcacaatccctggaaacactgattccccacgttcaggtcattgccaacgaacccgatctggtgagctttctgactaaacttgactggggcgttaaagttctcgcctctcttgatgcctgccgccgcgtggcatttgaaaacattgaagatgcagcccgtaacggcctgcactatgtcgagctgcgtttttcaccaggctacatggcaatggcacatcagctgcctgtagcgggtgttgtcgaagcggtgatcgatggcgtacgtgaaggttgccgcacctttggtgtgcaggcgaagcttatcggtattatgagccggaccttcggcgaagccgcctgtcagcaagagctggaggcctttttagcccaccgtgaccagattaccgcacttgatttagccggtgatgaacttggtttcccgggaagtctgttcctttctcatttcaaccgcgcgcgtgatgcgggctggcatattaccgtccatgcaggcgaagctgccggaccggaaagcatctggcaggcgattcgtgaactgggggcggagcgtattggacatggcgtaaaagccattgaagatcgggcgctgatggattttctcgccgagcaacaaattggtattgaatcctgtctgacctccaatattcagaccagcaccgtggcggatctggctgcacatccgctgaaaacgttccttgagcatggcattcgtgccagcattaacactgacgatccaggcgtgcagggagtggatatcattcacgaatataccgttgccgcgccagctgctgggttatcccgcgagcaaatccgccaggcacagattaatggtctggaaatggctttcctcagcgcagaggaaaaacgcgcactgcgagaaaaagtcgccgcgaagtaa

SEQ ID NO: 76 - DNA, 834 bp, Artificial Sequence
  Description of Artificial Sequence: Synthetic polynucleotide
  xapA
atgtatcaggctcagttttctcataacccactgtattgcgtagatattatcaagacttataaacctgatttcacgccacgagtggcctttattttaggttccgggctgggcgcgctggccgatcagattgagaacgcggtcgcaatttcctacgaaaagctgcctgggttcccggtaagtaccgtacacggtcatgcgggtgagctggtgctgggttatctccagggggtgccagtggcgtgtatgaaaggtcgcggacatttctacgaaggtcgtgggatgaccatcatgacggatgcaatccgtacctttaagttgctgggctgcgagttgctgttctgcaccaatgcggctggctcactgcgccctgaagtgggggccggcagtctggtcgcattgaaagatcacatcaacaccatgccgggaacgccgatggtgggtcttaatgatgaacgttttggtgagcgcttcttctcgctggcgaatgcctacgatgcggaataccgcgcactgttacaaaaagtggcgaaagaagaggggttccctctgacggagggcgtgttcgtctcatatccggggccgaatttcgagactgcggcggaaattcgcatgatgcaaattattggtggggatgttgttggtatgtctgtggtgcctgaggttatttcagctcgccattgcgaacttaaagtcgttgcggtctctgcgattaccaacatggcggaaggtctgagtgacgtgaagctttctcatgcccaaacgctggcagcagcggaactctcaaagcaaaactttattaatcttatttgcggctttctgcgcaaaattgcctga

SEQ ID NO: 77 - DNA, 720 bp, Artificial Sequence
  Description of Artificial Sequence: Synthetic polynucleotide
  deoD
atggctaccccacacattaatgcagaaatgggcgatttcgctgacgtagttttgatgccaggcgacccgctgcgtgcgaagtatattgctgaaactttccttgaagatgcccgtgaagtgaacaacgttcgcggtatgctgggcttcaccggtacttacaaaggccgcaaaatttccgtaatgggtcacggtatgggtatcccgtcctgctccatctacaccaaagaactgatcaccgatttcggcgtgaagaaaattatccgcgtgggttcctgtggcgcagttctgccgcacgtaaaactacgcgacgtcgttatcggtatgggtgcctgcaccgattccaaagttaaccgcatccgttttaaagaccatgactttgccgctatcgctgactttgacatggtgcgtaacgcggtagacgcggctaaagcactgggcgttgatgctcgcgtgggtaacctgttctccgctgacctgttctactctccggacggcgaaatgttcgacgtgatggaaaaatacggcatcctcggcgtggaaatggaagcggctggtatctacggcgtcgctgcagaatttggcgcgaaagccctgaccatctgcaccgtgtctgaccacatccgcactcacgagcagaccactgccgctgagcgtcagaccaccttcaacgacatgatcaaaatcgcactggaatccgttctgctgggcgataaagagtaa

SEQ ID NO: 78 - protein, 413 aa, Artificial Sequence
  Description of Artificial Sequence: Synthetic polypeptide
  NupC (polypeptide)
VHGNLTCLIFGANMDRVLHFVLALAVVAILALLVSSDRKKIRIRYVIQLLVIEVLLAWFFLNSDVGLGFVKGFSEMFEKLLGFANEGTNFVFGSMNDQGLAFFFLKVLCPIVFISALIGILQHIRVLPVIIRAIGFLLSKVNGMGKLESFNAVSSLILGQSENFIAYKDILGKISRNRMYTMAATAMSTVSMSIVGAYMTMLEPKYVVAALVLNMFSTFIVLSLINPYRVDASEENIQMSNLHEGQSFFEMLGEYILAGFKVAIIVAAMLIGFIALIAALNALFATVTGWFGYSISFQGILGYIFYPIAWVMGVPSSEALQVGSIMATKLVSNEFVAMMDLQKIASTLSPRAEGIISVFLVSFANFSSIGIIAGAVKGLNEEQGNVVSRFGLKLVYGSTLVSVLSASIAALVL

SEQ ID NO: 79 - protein, 752 aa, Artificial Sequence
  Description of Artificial Sequence: Synthetic polypeptide
  xdhA (polypeptide)
MRVDAIAKVTGRARYTDDYIMAGMCYAKYVRSPIAHGYAVNINDEQARSLPGVLAIFTWEDVPEIPFATAGHAWTLDENKRDTADRALLTRHVRHHGDAVAIVVARDELTAEKAAQLVSIEWQELPVITSPEAALAEDAAPIHNGGNLLKQSTMSTGNVQQTIDAADYQVQGHYQTPVIQHCHMESVTSLAWMEDDSRITIVSSTQIPHIVRRVVGQALDIPWSCVRVIKPFIGGGFGNKQDVLEEPMAAFLTSKLGGIPVKVSLSREECFLATRTRHAFTIDGQMGVNRDGTLKGYSLDVLSNTGAYASHGHSIASAGGNKVAYLYPRCAYAYSSKTCYTNLPSAGAMRGYGAPQVVFAVESMLDDAATALGIDPVEIRLRNAAREGDANPLTGKRIYSAGLPECLEKGRKIFEWEKRRAECQNQQGNLRRGVGVACFSYTSNTWPVGVEIAGARLLMNQDGTINVQSGATEIGQGADTVFSQMVAETVGVPVSDVHVISTQDTDVTPFDPGAFASRQSYVAAPALRSAALLLKEKIIAHAAVMLHQSAMNLTLIKGHIVLIERPEEPLMSLKDLAMDAFYHPERGGQLSAESSIKTTTNPPAFGCTFVDLTVDIALCKVTINRILNVHDSGHILNPLLAEGQVHGGMGMGIGWALFEEMIIDAKSGVVRNPNLLDYKMPTMPDLPQLESAFVEINEPQSAYGHKSLGEPPIIPVAAAIRNAVKMATGVAINTLPLTPKRLYEEFHLAGLI

SEQ ID NO: 80 - protein, 292 aa, Artificial Sequence
  Description of Artificial Sequence: Synthetic polypeptide
  xdhB (polypeptide)
MFDFASYHRATTLADAITLLADNPQAKLLAGGTDVLIQLHHHNDRYRHIVDIHNLAELQGITQAEDGALRIGSATTFTQLIEDPVIQRNLPALCAAAASIAGPQIRNVATYGGNICNGATSADSATPTLIYDAKLELHSPRGVRFVPINGFHTGPGKVSLEHDEILVAFHFPPQPKEHAGSAHFKYAMRDAMDISTIGCAAHCRLDNGNFSELRLAFGVAAPTPIRCQHAEQTAQNAPLNLQTLEAISESVLQDVAPRSSWRASKEFRLHLIQTMTKKVISEAVAAAGGKLQ

SEQ ID NO: 81 - protein, 292 aa, Artificial Sequence; identical to SEQ ID NO: 80
  Description of Artificial Sequence: Synthetic polypeptide
  xdhC (polypeptide)

SEQ ID NO: 82 - protein, 333 aa, Artificial Sequence
  Description of Artificial Sequence: Synthetic polypeptide
  Add (polypeptide)
MIDTTLPLTDIHRHLDGNIRPQTILELGRQYNISLPAQSLETLIPHVQVIANEPDLVSFLTKLDWGVKVLASLDACRRVAFENIEDAARNGLHYVELRFSPGYMAMAHQLPVAGVVEAVIDGVREGCRTFGVQAKLIGIMSRTFGEAACQQELEAFLAHRDQITALDLAGDELGFPGSLFLSHFNRARDAGWHITVHAGEAAGPESIWQAIRELGAERIGHGVKAIEDRALMDFLAEQQIGIESCLTSNIQTSTVADLAAHPLKTFLEHGIRASINTDDPGVQGVDIIHEYTVAAPAAGLSREQIRQAQINGLEMAFLSAEEKRALREKVAAK

SEQ ID NO: 83 - protein, 277 aa, Artificial Sequence
  Description of Artificial Sequence: Synthetic polypeptide
  xapA (polypeptide)
MYQAQFSHNPLYCVDIIKTYKPDFTPRVAFILGSGLGALADQIENAVAISYEKLPGFPVSTVHGHAGELVLGYLQGVPVACMKGRGHFYEGRGMTIMTDAIRTFKLLGCELLFCTNAAGSLRPEVGAGSLVALKDHINTMPGTPMVGLNDERFGERFFSLANAYDAEYRALLQKVAKEEGFPLTEGVFVSYPGPNFETAAEIRMMQIIGGDVVGMSVVPEVISARHCELKVVAVSAITNMAEGLSDVKLSHAQTLAAAELSKQNFINLICGFLRKIA

SEQ ID NO: 84 - protein, 239 aa, Artificial Sequence
  Description of Artificial Sequence: Synthetic polypeptide
  deoD (polypeptide)
MATPHINAEMGDFADVVLMPGDPLRAKYIAETFLEDAREVNNVRGMLGFTGTYKGRKISVMGHGMGIPSCSIYTKELITDFGVKKIIRVGSCGAVLPHVKLRDVVIGMGACTDSKVNRIRFKDHDFAAIADFDMVRNAVDAAKALGVDARVGNLFSADLFYSPDGEMFDVMEKYGILGVEMEAAGIYGVAAEFGAKALTICTVSDHIRTHEQTTAAERQTTFNDMIKIALESVLLGDKE

SEQ ID NO: 85 - DNA, 60 bp, Artificial Sequence
  Description of Artificial Sequence: Synthetic oligonucleotide
  argA WT
gcaaaaaaacagaataaaaatacaataatttcgaataatcatgcaaagaggtgtaccgtg

SEQ ID NO: 86 - DNA, 60 bp, Artificial Sequence
  Description of Artificial Sequence: Synthetic oligonucleotide
  argA mutant
gcaaaaaaacactttaaaaacttaataatttcctttaatcacttaaagaggtgtaccgtg

SEQ ID NO: 87 - DNA, 76 bp, Artificial Sequence
  Description of Artificial Sequence: Synthetic oligonucleotide
  argI WT
agacttgcaaatgaataatcatccatatagattgaattttaattcattaaggcgttagccacaggagggatctatg

SEQ ID NO: 88 - DNA, 76 bp, Artificial Sequence
  Description of Artificial Sequence: Synthetic oligonucleotide
  argI mutant
agacttgcaaacttatacttatccatatagattttgttttaatttgttaaggcgttagccacaggagggatctatg

SEQ ID NO: 89 - DNA, 160 bp, Artificial Sequence
  Description of Artificial Sequence: Synthetic polynucleotide
  argCBH WT
tcattgttgacacacctctggtcatgatagtatcaatattcatgcagtatttatgaataaaaatacactaacgttgagcgtaataaaacccaccagccgtaaggtgaatgttttacgtttaacctggcaaccagacataagaaggtgaatagccccgatg

SEQ ID NO: 90 - DNA, 160 bp, Artificial Sequence
  Description of Artificial Sequence: Synthetic polynucleotide
  argCBH mutant
tcattgttgacacacctctggtcatgatagtatcaaacttcatgggatatttatctttaaaaatacttgaacgttgagcgtaataaaacccaccagccgtaaggtgaatgttttacgtttaacctggcaaccagacataagaaggtgaatagccccgatg

SEQ ID NO: 91 - DNA, 160 bp, Artificial Sequence
  Description of Artificial Sequence: Synthetic polynucleotide
  argE WT
catcggggctattcaccttcttatgtctggttgccaggttaaacgtaaaacattcaccttacggctggtgggttttattacgctcaacgttagtgtatttttattcataaatactgcatgaatattgatactatcatgaccagaggtgtgtcaacaatga

SEQ ID NO: 92 - DNA, 160 bp, Artificial Sequence
  Description of Artificial Sequence: Synthetic polynucleotide
  argE mutant
catcggggctattcaccttcttatgtctggttgccaggttaaacgtaaaacattcaccttacggctggtgggttttattacgctcaacgttcaagtatttttaaagataaatatcccatgaagtttgatactatcatgaccagaggtgtgtcaacaatga

SEQ ID NO: 93 - DNA, 81 bp, Artificial Sequence
  Description of Artificial Sequence: Synthetic oligonucleotide
  carAB WT
agcagatttgcattgatttacgtcatcattgtgaattaatatgcaaataaagtgagtgaatattctctggagggtgttttg

SEQ ID NO: 94 - DNA, 81 bp, Artificial Sequence
  Description of Artificial Sequence: Synthetic oligonucleotide
  carAB mutant
agcagatttgcattgatttacgtcatcattgtcttttaatatcttaataactggagtgacgtttctctggagggtgttttg

SEQ ID NO: 95 - DNA, 88 bp, Artificial Sequence
  Description of Artificial Sequence: Synthetic oligonucleotide
  argD WT
tttctgattgccattcagtgattttttatgcatattttgtgattataatttcatatttatttatgcgtaacagggtgatcatgagatg

SEQ ID NO: 96 - DNA, 88 bp, Artificial Sequence
  Description of Artificial Sequence: Synthetic oligonucleotide
  argD mutant
tttctgattgccattcagtctttttttacttatattttgtctttataatcttatatttatttatgcgtaacagggtgatcatgagatg

SEQ ID NO: 97 - DNA, 219 bp, Artificial Sequence
  Description of Artificial Sequence: Synthetic polynucleotide
  argG WT
ctaatcacgtgaatgaatatccagttcactttcatttgttgaatacttttaccttctcctgctttcccttaagcgcattattttacaaaaaacacactaaactcttcctgtctccgataaaagatgattaaatgaaaactcatttattttgcataaaaattcagtgaaagcagaaatccaggctcatcatcagttaattaagcagggtgttattttatg

SEQ ID NO: 98 - DNA, 219 bp, Artificial Sequence
  Description of Artificial Sequence: Synthetic polynucleotide
  argG mutant
ctaatcaccttaatgaatcttcagttcactttcatttgttgaatacttttaccttctcctgctttcccttaagcgcattattttacaaaaaacacactaaactcttcctgtctccgataaaagatgatcttatgaaaacctttttatttcttataaaaatcttgtgaaagcagaaatccaggctcatcatcagttaattaagcagggtgttattttatg

SEQ ID NO: 99 - DNA, 233 bp, Artificial Sequence
  Description of Artificial Sequence: Synthetic polynucleotide
  argG mutant
cctgaaacgtggcaaattctactcgttttgggtaaaaaatgcaaatactgctgggatttggtgtaccgagacgggacgtaaaatctgcaggcattatagtgatccacgccacattttgtcaacgtttattgctaatcattgacggctagctcagtcctaggtacagtgctagcacccgtttttttgggctagaaataattttgtttaactttaagaaggagatatacataccc

SEQ ID NO: 100 - DNA, 1053 bp, Artificial Sequence
  Description of Artificial Sequence: Synthetic polynucleotide
  Wild-type argG
gtgatccacgccacattttgtcaacgtttattgctaatcacgtgaatgaatatccagttcactttcatttgttgaatacttttaccttctcctgctttcccttaagcgcattattttacaaaaaacacactaaactcttcctgtctccgataaaagatgattaaatgaaaactcatttattttgcataaaaattcagtgaaagcagaaatccaggctcatcatcagttaattaagcagggtgttattttatgacgacgattctcaagcatctcccggtaggtcaacgtattggtatcgctttttccggcggtctggacaccagtgccgcactgctgtggatgcgacaaaagggagcggttccttatgcatatactgcaaacctgggccagccagacgaagaggattatgatgcgatccctcgtcgtgccatggaatacggcgcggagaacgcacgtctgatcgactgccgcaaacaactggtggccgaaggtattgccgctattcagtgtggcgcatttcataacaccactggtggactgacctatttcaacacgacgccgctgggccgcgccgtgaccggcaccatgctggttgctgctatgaaagaagatggcgtgaatatctggggtgacggcagcacctataaaggaaacgatatcgaacgtttctaccgttacggtctgctgaccaatgctgaactgcagatttacaaaccgtggcttgatactgactttattgatgaactgggtggccgtcatgagatgtctgaatttatgattgcctgcggtttcgactacaaaatgtctgtcgaaaaagcttactccacggactccaacatgcttggtgcaacgcatgaagcgaaggatctggaatacctcaactccagcgtcaaaatcgtcaacccaattatgggcgtgaagttttgggatgagagcgtgaaaatcccggcagaagaagtcacagtacgctttgagcaaggtcatccggtggcgctgaacggtaaaacctttagcgacgacgtagaaatgatgctggaagctaaccgcatcggc

SEQ ID NO: 101 - DNA, 734 bp, Artificial Sequence
  Description of Artificial Sequence: Synthetic polynucleotide
  Constitutive argG
ttgacggctagctcagtcctaggtacagtgctagcacccgtttttttgggctagaaataattttgtttaactttaagaaggagatatacatacccatgacgacgattctcaagcatctcccggtaggtcaacgtattggtatcgctttttccggcggtctggacaccagtgccgcactgctgtggatgcgacaaaagggagcggttccttatgcatatactgcaaacctgggccagccagacgaagaggattatgatgcgatccctcgtcgtgccatggaatacggcgcggagaacgcacgtctgatcgactgccgcaaacaactggtggccgaaggtattgccgctattcagtgtggcgcatttcataacaccactggtggactgacctatttcaacacgacgccgctgggccgcgccgtgaccggcaccatgctggttgctgctatgaaagaagatggcgtgaatatctggggtgacggcagcacctataaaggaaacgatatcgaacgtttctaccgttacggtctgctgaccaatgctgaactgcagatttacaaaccgtggcttgatactgactttattgatgaactgggtggccgtcatgagatgtctgaatttatgattgcctgcggtttcgactacaaaatgtctgtcgaaaaagcttactccacggactccaacatgcttggtgcaacgcatgaagcgaaggatctggaatacctcaactccagc

SEQ ID NO: 102 - DNA, 1332 bp, Artificial Sequence
  Description of Artificial Sequence: Synthetic polynucleotide
  Nucleotide sequence of exemplary argAfbr sequence
atggtaaaggaacgtaaaaccgagttggtcgagggattccgccattcggttccctgtatcaatacccaccggggaaaaacgtttgtcatcatgctcggcggtgaagccattgagcatgagaatttctccagtatcgttaatgatatcgggttgttgcacagcctcggcatccgtctggtggtggtctatggcgcacgtccgcagatcgacgcaaatctggctgcgcatcaccacgaaccgctgtatcacaagaatatacgtgtgaccgacgccaaaacactggaactggtgaagcaggctgcgggaacattgcaactggatattactgctcgcctgtcgatgagtctcaataacacgccgctgcagggcgcgcatatcaacgtcgtcagtggcaattttattattgcccagccgctgggcgtcgatgacggcgtggattactgccatagcgggcgtatccggcggattgatgaagacgcgatccatcgtcaactggacagcggtgcaatagtgctaatggggccggtcgctgtttcagtcactggcgagagctttaacctgacctcggaagagattgccactcaactggccatcaaactgaaagctgaaaagatgattggtttttgctcttcccagggcgtcactaatgacgacggtgatattgtctccgaacttttccctaacgaagcgcaagcgcgggtagaagcccaggaagagaaaggcgattacaactccggtacggtgcgctttttgcgtggcgcagtgaaagcctgccgcagcggcgtgcgtcgctgtcatttaatcagttatcaggaagatggcgcgctgttgcaagagttgttctcacgcgacggtatcggtacgcagattgtgatggaaagcgccgagcagattcgtcgcgcaacaatcaacgatattggcggtattctggagttgattcgcccactggagcagcaaggtattctggtacgccgttctcgcgagcagctggagatggaaatcgacaaattcaccattattcagcgcgataacacgactattgcctgcgccgcgctctatccgttcccggaagagaagattggggaaatggcctgtgtggcagttcacccggattaccgcagttcatcaaggggtgaagttctgctggaacgcattgccgctcaggctaagcagagcggcttaagcaaattgtttgtgctgaccacgcgcagtattcactggttccaggaacgtggatttaccccagtggatattgatttactgcccgagagcaaaaagcagttgtacaactaccagcgtaaatccaaagtgttgatggcggatttagggtaa

SEQ ID NO: 103 - protein, 443 aa, Artificial Sequence
  Description of Artificial Sequence: Synthetic polypeptide
  Polypeptide sequence of exemplary argAfbr sequence
MVKERKTELVEGFRHSVPCINTHRGKTFVIMLGGEAIEHENFSSIVNDIGLLHSLGIRLVVVYGARPQIDANLAAHHHEPLYHKNIRVTDAKTLELVKQAAGTLQLDITARLSMSLNNTPLQGAHINVVSGNFIIAQPLGVDDGVDYCHSGRIRRIDEDAIHRQLDSGAIVLMGPVAVSVTGESFNLTSEEIATQLAIKLKAEKMIGFCSSQGVTNDDGDIVSELFPNEAQARVEAQEEKGDYNSGTVRFLRGAVKACRSGVRRCHLISYQEDGALLQELFSRDGIGTQIVMESAEQIRRATINDIGGILELIRPLEQQGILVRRSREQLEMEIDKFTIIQRDNTTIACAALYPFPEEKIGEMACVAVHPDYRSSSRGEVLLERIAAQAKQSGLSKLFVLTTRSIHWFQERGFTPVDIDLLPESKKQLYNYQRKSKVLMADLG

SEQ ID NO: 104 - protein, 26 aa, Artificial Sequence
  Description of Artificial Sequence: Synthetic peptide
  melittin
GIGAVLKVLTTGLPALISWIKRKKQQ

SEQ ID NO: 105 - protein, 37 aa, Artificial Sequence
  Description of Artificial Sequence: Synthetic polypeptide
  LL-37
LLGDFFRKSKEKIGKEFKRIVQRIKDFLRNLVPRTES

SEQ ID NO: 106 - protein, 35 aa, Artificial Sequence
  Description of Artificial Sequence: Synthetic polypeptide
  cecropin B
KWKVFKKIEKMGRNIRNGIVKAGPAIAVLGEAKAL

SEQ ID NO: 107 - protein, 24 aa, Artificial Sequence
  Description of Artificial Sequence: Synthetic peptide
  Magainin 2
GIGKFLHSAKKFGKAFVGEEIMNS

SEQ ID NO: 108 - protein, 10 aa, Artificial Sequence
  Description of Artificial Sequence: Synthetic peptide
  EZH2
FINDEIFVEL

SEQ ID NO: 109 - protein, 9 aa, Artificial Sequence
  Description of Artificial Sequence: Synthetic peptide
  EZH2
KYDCFLHPF

SEQ ID NO: 110 - protein, 9 aa, Artificial Sequence
  Description of Artificial Sequence: Synthetic peptide
  EZH2
KYVGIEREM

SEQ ID NO: 111 - protein, 9 aa, Artificial Sequence
  Description of Artificial Sequence: Synthetic peptide
  glypican-3
EYILSLEEL

SEQ ID NO: 112 - DNA, 18 bp, Artificial Sequence
  Description of Artificial Sequence: Synthetic oligonucleotide
  consensus sequence
ttgttgayryrtcaacwa

SEQ ID NO: 113 - DNA, 15 bp, Artificial Sequence
  Description of Artificial Sequence: Synthetic oligonucleotide
  consensus sequence
  modified_base (8)..(8): a, c, g or t
ttataatnattataa

SEQ ID NO: 114 - DNA, 22 bp, Artificial Sequence
  Description of Artificial Sequence: Synthetic oligonucleotide
  LacO
ggaattgtgagcgctcacaatt

SEQ ID NO: 115 - DNA, 24 bp, Artificial Sequence
  Description of Artificial Sequence: Synthetic oligonucleotide
  UP element helps recruit RNA polymerase
ggaaaatttttttaaaaaaaaaac

SEQ ID NO: 116 - DNA, 25 bp, Artificial Sequence
  Description of Artificial Sequence: Synthetic oligonucleotide
  RBS
ttatataaaagtgggaggtgcccga

SEQ ID NO: 117 - protein, 9 aa, Artificial Sequence
  Description of Artificial Sequence: Synthetic peptide
  MAGE-A1
KVLEYVIKV

SEQ ID NO: 118 - protein, 10 aa, Artificial Sequence
  Description of Artificial Sequence: Synthetic peptide
  Melan-A / MART-1
  MOD_RES (1)..(1): Glu or absent
XAAGIGILTV

SEQ ID NO: 119 - protein, 9 aa, Artificial Sequence
  Description of Artificial Sequence: Synthetic peptide
  Melan-A / MART-1
ILTVILGVL

SEQ ID NO: 120 - protein, 11 aa, Artificial Sequence
  Description of Artificial Sequence: Synthetic peptide
  Melan-A / MART-1
  MOD_RES (11)..(11): Thr or absent
AEEAAGIGILX

SEQ ID NO: 121 - protein, 11 aa, Artificial Sequence
  Description of Artificial Sequence: Synthetic peptide
  Melan-A / MART-1
RNGYRALMDKS

SEQ ID NO: 122 - protein, 12 aa, Artificial Sequence
  Description of Artificial Sequence: Synthetic peptide
  Melan-A / MART-1
EEAAGIGILTVI

SEQ ID NO: 123 - DNA, 46 bp, Artificial Sequence
  Description of Artificial Sequence: Synthetic oligonucleotide
  SR34
cgcacactggcgtcggctctggcaggatgtttcgtaattagatagc

SEQ ID NO: 124 - protein, 453 aa, Artificial Sequence
  Description of Artificial Sequence: Synthetic polypeptide
  Bevacizumab (Avastin) anti-VEGF, Heavy Chain
EVQLVESGGGLVQPGGSLRLSCAASGYTFTNYGMNWVRQAPGKGLEWVGWINTYTGEPTYAADFKRRFTFSLDTSKSTAYLQMNSLRAEDTAVYYCAKYPHYYGSSHWYFDVWGQGTLVTVSSASTKGPSVFPLAPSSKSTSGGTAALGCLVKDYFPEPVTVSWNSGALTSGVHTFPAVLQSSGLYSLSSVVTVPSSSLGTQTYICNVNHKPSNTKVDKKVEPKSCDKTHTCPPCPAPELLGGPSVFLFPPKPKDTLMISRTPEVTCVVVDVSHEDPEVKFNWYVDGVEVHNAKTKPREEQYNSTYRVVSVLTVLHQDWLNGKEYKCKVSNKALPAPIEKTISKAKGQPREPQVYTLPPSREEMTKNQVSLTCLVKGFYPSDIAVEWESNGQPENNYKTTPPVLDSDGSFFLYSKLTVDKSRWQQGNVFSCSVMHEALHNHYTQKSLSLSPGK

SEQ ID NO: 125 - protein, 214 aa, Artificial Sequence
  Description of Artificial Sequence: Synthetic polypeptide
  Bevacizumab (Avastin) anti-VEGF, Light Chain
DIQMTQSPSSLSASVGDRVTITCSASQDISNYLNWYQQKPGKAPKVLIYFTSSLHSGVPSRFSGSGSGTDFTLTISSLQPEDFATYYCQQYSTVPWTFGQGTKVEIKRTVAAPSVFIFPPSDEQLKSGTASVVCLLNNFYPREAKVQWKVDNALQSGNSQESVTEQDSKDSTYSLSSTLTLSKADYEKHKVYACEVTHQGLSSPVTKSFNRGEC

SEQ ID NO: 126 - protein, 9 aa, Artificial Sequence
  Description of Artificial Sequence: Synthetic peptide
  D-peptide A
RLYLRIGRR

SEQ ID NO: 127 - protein, 9 aa, Artificial Sequence
  Description of Artificial Sequence: Synthetic peptide
  D-peptide B
RLRLRIGRR

SEQ ID NO: 128 - protein, 9 aa, Artificial Sequence
  Description of Artificial Sequence: Synthetic peptide
  D-peptide C
ALYLAIRRR

SEQ ID NO: 129 - protein, 9 aa, Artificial Sequence
  Description of Artificial Sequence: Synthetic peptide
  D-peptide D
RLLLRIGRR

SEQ ID NO: 130 - protein, 15 aa, Artificial Sequence
  Description of Artificial Sequence: Synthetic peptide
  D-K6L9
LKLLKKLLKKLLKLL

SEQ ID NO: 131 - protein, 26 aa, Artificial Sequence
  Description of Artificial Sequence: Synthetic peptide
  NRC-03
GRRKRKWLRRIGKGVKIIGGAALDHL

SEQ ID NO: 132 - protein, 25 aa, Artificial Sequence
  Description of Artificial Sequence: Synthetic peptide
  NRC-07
RWGKWFKKATHVGKHVGKAALTAYL

SEQ ID NO: 133 - protein, 18 aa, Artificial Sequence
  Description of Artificial Sequence: Synthetic peptide
  Gomesin
ZCRRLCYKQRCVTYCRGR

SEQ ID NO: 134 - protein, 20 aa, Artificial Sequence
  Description of Artificial Sequence: Synthetic peptide
  Hepcidin TH2-3
QSHLSLCRWCCNCCRSNKGC

SEQ ID NO: 135 - protein, 33 aa, Artificial Sequence
  Description of Artificial Sequence: Synthetic polypeptide
  Dermaseptin B2
GLWSKIKEVGKEAAKAAAKAAGKAALGAVSEAV

SEQ ID NO: 136 - protein, 13 aa, Artificial Sequence
  Description of Artificial Sequence: Synthetic peptide
  PTP7
FLGALFKALSKLL

SEQ ID NO: 137 - protein, 42 aa, Artificial Sequence
  Description of Artificial Sequence: Synthetic polypeptide
  MGA2
GIGKFLHSAKKFGKAFVGEIMNSGGKKWKMRRNQFWVKVQRG

SEQ ID NO: 138 - protein, 30 aa, Artificial Sequence
  Description of Artificial Sequence: Synthetic polypeptide
  HNP-1
ACYCRIPACIAGERRYGTCIYQGRLWAFCC

SEQ ID NO: 139 - protein, 17 aa, Artificial Sequence
  Description of Artificial Sequence: Synthetic peptide
  Tachyplesin
KWCFRVCYRGICYRRCR

SEQ ID NO: 140 - protein, 15 aa, Artificial Sequence
  Description of Artificial Sequence: Synthetic peptide
  Temporin-1CEa
FVDLKKIANIINSIF

SEQ ID NO: 141 - protein, 27 aa, Artificial Sequence
  Description of Artificial Sequence: Synthetic peptide
  NK-2
KILRGVCKKIMRTFLRRISKDILTGKK

SEQ ID NO: 142 - protein, 6 aa, Artificial Sequence
  Description of Artificial Sequence: Synthetic peptide
  Bovine lactoferricin B6 (Lbcin B6)
RRWQWR

SEQ ID NO: 143 - protein, 34 aa, Artificial Sequence
  Description of Artificial Sequence: Synthetic polypeptide
  Cecropin CB1
KWKVFKKIEKMGRNIRNGIVKAGPKWKVFKKIEK

SEQ ID NO: 144 - protein, 26 aa, Artificial Sequence
  Description of Artificial Sequence: Synthetic peptide
  Melittin
GIGAVLKVLTTGLPALISWIKRKRQQ

SEQ ID NO: 145 - protein, 17 aa, Artificial Sequence
  Description of Artificial Sequence: Synthetic peptide
  Tachyplesin
KWCFRVCYRGICYRRCR

SEQ ID NO: 146 - protein, 37 aa, Artificial Sequence; identical to SEQ ID NO: 105
  Description of Artificial Sequence: Synthetic polypeptide
  LL-37

SEQ ID NO: 147 - protein, 35 aa, Artificial Sequence; identical to SEQ ID NO: 106
  Description of Artificial Sequence: Synthetic polypeptide
  Cecropin B

SEQ ID NO: 148 - protein, 23 aa, Artificial Sequence
  Description of Artificial Sequence: Synthetic peptide
  Magainin 2
GIGKFLHSAKKFGKAFVGEIMNS

SEQ ID NO: 149 - protein, 21 aa, Artificial Sequence
  Description of Artificial Sequence: Synthetic peptide
  Buforin IIb
RAGLQFPVGRLLRRLLRRLLR

SEQ ID NO: 150 - protein, 13 aa, Artificial Sequence
  Description of Artificial Sequence: Synthetic peptide
  Alloferon-1
HGVSGHGQHGVHG

SEQ ID NO: 151 - protein, 12 aa, Artificial Sequence
  Description of Artificial Sequence: Synthetic peptide
  Alloferon-2
GVSGHGQHGVHG

SEQ ID NO: 152 - protein, 253 aa, Artificial Sequence
  Description of Artificial Sequence: Synthetic polypeptide
  interleukin-12 subunit alpha precursor (homo sapiens)
MWPPGSASQPPPSPAAATGLHPAARPVSLQCRLSMCPARSLLLVATLVLLDHLSLARNLPVATPDPGMFPCLHHSQNLLRAVSNMLQKARQTLEFYPCTSEEIDHEDITKDKTSTVEACLPLELTKNESCLNSRETSFITNGSCLASRKTSFMMALCLSSIYEDLKMYQVEFKTMNAKLLMDPKRQIFLDQNMLAVIDELMQALNFNSETVPQKSSLEEPDFYKTKIKLCILLHAFRIRAVTIDRVMSYLNAS

SEQ ID NO: 153 - protein, 328 aa, Artificial Sequence
  Description of Artificial Sequence: Synthetic polypeptide
  interleukin-12 subunit beta precursor (homo sapiens)
MCHQQLVISWFSLVFLASPLVAIWELKKDVYVVELDWYPDAPGEMVVLTCDTPEEDGITWTLDQSSEVLGSGKTLTIQVKEFGDAGQYTCHKGGEVLSHSLLLLHKKEDGIWSTDILKDQKEPKNKTFLRCEAKNYSGRFTCWWLTTISTDLTFSVKSSRGSSDPQGVTCGAATLSAERVRGDNKEYEYSVECQEDSACPAAEESLPIEVMVDAVHKLKYENYTSSFFIRDIIKPDPPKNLQLKPLKNSRQVEVSWEYPDTWSTPHSYFSLTFCVQVQGKSKREKKDRVFTDKTSATVICRKNASISVRAQDRYYSSSWSEWASVPCS

SEQ ID NO: 154 - protein, 162 aa, Artificial Sequence
  Description of Artificial Sequence: Synthetic polypeptide
  interleukin-15 isoform1 preproprotein (homo sapiens)
MRISKPHLRSISIQCYLCLLLNSHFLTEAGIHVFILGCFSAGLPKTEANWVNVISDLKKIEDLIQSMHIDATLYTESDVHPSCKVTAMKCFLLELQVISLESGDASIHDTVENLIILANNSLSSNGNVTESGCKECEELEEKNIKEFLQSFVHIVQMFINTS

SEQ ID NO: 155 - protein, 135 aa, Artificial Sequence
  Description of Artificial Sequence: Synthetic polypeptide
  interleukin-15 isoform 2 preproprotein (homo sapiens)
MVLGTIDLCSCFSAGLPKTEANWVNVISDLKKIEDLIQSMHIDATLYTESDVHPSCKVTAMKCFLLELQVISLESGDASIHDTVENLIILANNSLSSNGNVTESGCKECEELEEKNIKEFLQSFVHIVQMFINTS

SEQ ID NO: 156 - protein, 153 aa, Artificial Sequence
  Description of Artificial Sequence: Synthetic polypeptide
  interleukin-2 precursor (homo sapiens)
MYRMQLLSCIALSLALVTNSAPTSSSTKKTQLQLEHLLLDLQMILNGINNYKNPKLTRMLTFKFYMPKKATELKHLQCLEEELKPLEEVLNLAQSKNFHLRPRDLISNINVIVLELKGSETTFMCEYADETATIVEFLNRWITFCQSIISTLT

SEQ ID NO: 157 - protein, 162 aa, Artificial Sequence
  Description of Artificial Sequence: Synthetic polypeptide
  interleukin-21 isoform 1 precursor (homo sapiens)
MRSSPGNMERIVICLMVIFLGTLVHKSSSQGQDRHMIRMRQLIDIVDQLKNYVNDLVPEFLPAPEDVETNCEWSAFSCFQKAQLKSANTGNNERIINVSIKKLKRKPPSTNAGRRQKHRLTCPSCDSYEKKPPKEFLERFKSLLQKMIHQHLSSRTHGSEDS

SEQ ID NO: 158 - protein, 153 aa, Artificial Sequence
  Description of Artificial Sequence: Synthetic polypeptide
  interleukin-21 isoform 2 precursor (homo sapiens)
MRSSPGNMERIVICLMVIFLGTLVHKSSSQGQDRHMIRMRQLIDIVDQLKNYVNDLVPEFLPAPEDVETNCEWSAFSCFQKAQLKSANTGNNERIINVSIKKLKRKPPSTNAGRRQKHRLTCPSCDSYEKKPPKEFLERFKSLLQKVSTLSFI

SEQ ID NO: 159 - protein, 144 aa, Artificial Sequence
  Description of Artificial Sequence: Synthetic polypeptide
  granulocyte-macrophage colony-stimulating factor precursor (homo sapiens)
MWLQSLLLLGTVACSISAPARSPSPSTQPWEHVNAIQEARRLLNLSRDTAAEMNETVEVISEMFDLQEPTCLQTRLELYKQGLRGSLTKLKGPLTMMASHYKQHCPPTPETSCATQIITFESFKENLKDFLLVIPFDCWEPVQE

SEQ ID NO: 160 - protein, 10 aa, Artificial Sequence
  Description of Artificial Sequence: Synthetic peptide
  alpha-actinin-4
FIASNGVKLV

SEQ ID NO: 161 - protein, 16 aa, Artificial Sequence
  Description of Artificial Sequence: Synthetic peptide
  ARTC1
YSVYFNLPADTIYTNH

SEQ ID NO: 162 - protein, 9 aa, Artificial Sequence
  Description of Artificial Sequence: Synthetic peptide
  BCR-ABL fusion protein (b3a2)
SSKALQRPV

SEQ ID NO: 163 - protein, 9 aa, Artificial Sequence
  Description of Artificial Sequence: Synthetic peptide
  BCR-ABL fusion protein (b3a2)
GFKQSSKAL

SEQ ID NO: 164 - protein, 17 aa, Artificial Sequence
  Description of Artificial Sequence: Synthetic peptide
  BCR-ABL fusion protein (b3a2)
ATGFKQSSKALQRPVAS

SEQ ID NO: 165 - protein, 29 aa, Artificial Sequence
  Description of Artificial Sequence: Synthetic peptide
  B-RAF
EDLTVKIGDFGLATEKSRWSGSHQFEQLS

SEQ ID NO: 166 - protein, 10 aa, Artificial Sequence
  Description of Artificial Sequence: Synthetic peptide
  CASP-5
FLIIWQNTMG

SEQ ID NO: 167 - protein, 9 aa, Artificial Sequence
  Description of Artificial Sequence: Synthetic peptide
  CASP-8
FPSDSWCYF

SEQ ID NO: 168 - protein, 9 aa, Artificial Sequence
  Description of Artificial Sequence: Synthetic peptide
  beta-catenin
SYLDSGIHF

SEQ ID NO: 169 - protein, 13 aa, Artificial Sequence
  Description of Artificial Sequence: Synthetic peptide
  Cdc27
FSWAMDLDPKGAE

SEQ ID NO: 170 - protein, 10 aa, Artificial Sequence
  Description of Artificial Sequence: Synthetic peptide
  CDK4
ACDPHSGHFV

SEQ ID NO: 171 - protein, 9 aa, Artificial Sequence
  Description of Artificial Sequence: Synthetic peptide
  CDK12
CILGKLFTK

SEQ ID NO: 172 - protein, 10 aa, Artificial Sequence
  Description of Artificial Sequence: Synthetic peptide
  CDKN2A
AVCPWTWLRG

SEQ ID NO: 173 - protein, 9 aa, Artificial Sequence
  Description of Artificial Sequence: Synthetic peptide
  CLPP
ILDKVLVHL

SEQ ID NO: 174 - protein, 15 aa, Artificial Sequence
  Description of Artificial Sequence: Synthetic peptide
  COA-1
TLYQDDTLTLQAAGE

SEQ ID NO: 175 - protein, 9 aa, Artificial Sequence
  Description of Artificial Sequence: Synthetic peptide
  CSNK1A1
GLFGDIYLA

SEQ ID NO: 176 - protein, 16 aa, Artificial Sequence
  Description of Artificial Sequence: Synthetic peptide
  dek-can fusion protein
TMKQICKKEIRRLHQY

SEQ ID NO: 177 - protein, 10 aa, Artificial Sequence
  Description of Artificial Sequence: Synthetic peptide
  EFTUD2
KILDAVVAQK

SEQ ID NO: 178 - protein, 9 aa, Artificial Sequence
  Description of Artificial Sequence: Synthetic peptide
  Elongation factor 2
ETVSEQSNV

SEQ ID NO: 179 - protein, 10 aa, Artificial Sequence
  Description of Artificial Sequence: Synthetic peptide
  ETV6-AML1 fusion protein
RIAECILGMI

SEQ ID NO: 180 - protein, 15 aa, Artificial Sequence
  Description of Artificial Sequence: Synthetic peptide
  ETV6-AML1 fusion protein
IGRIAECILGMNPSR

SEQ ID NO: 181 - protein, 10 aa, Artificial Sequence
  Description of Artificial Sequence: Synthetic peptide
  FLT3-ITD
YVDFREYEYY

SEQ ID NO: 182 - protein, 9 aa, Artificial Sequence
  Description of Artificial Sequence: Synthetic peptide
  FNDC3B
VVMSWAPPV

SEQ ID NO: 183 - protein, 14 aa, Artificial Sequence
  Description of Artificial Sequence: Synthetic peptide
  FN1
MIFEKHGFRRTTPP

SEQ ID NO: 184 - protein, 10 aa, Artificial Sequence
  Description of Artificial Sequence: Synthetic peptide
  GAS7
SLADEAEVYL

SEQ ID NO: 185 - protein, 10 aa, Artificial Sequence
  Description of Artificial Sequence: Synthetic peptide
  GPNMB
TLDWLLQTPK

SEQ ID NO: 186 - protein, 9 aa, Artificial Sequence
  Description of Artificial Sequence: Synthetic peptide
  HAUS3
ILNAMIAKI

SEQ ID NO: 187 - protein, 8 aa, Artificial Sequence
  Description of Artificial Sequence: Synthetic peptide
  HSDL1
CYMEAVAL

SEQ ID NO: 188 - protein, 9 aa, Artificial Sequence
  Description of Artificial Sequence: Synthetic peptide
  LDLR-fucosyltransferaseAS
WRRAPAPGA

SEQ ID NO: 189 - protein, 9 aa, Artificial Sequence
  Description of Artificial Sequence: Synthetic peptide
  fusion protein
PVTWRRAPA

SEQ ID NO: 190-191 - skipped (2 entries)

SEQ ID NO: 192 - protein, 10 aa, Artificial Sequence
  Description of Artificial Sequence: Synthetic peptide
  hsp70-2
SLFEGIDIYT

SEQ ID NO: 193 - protein, 9 aa, Artificial Sequence
  Description of Artificial Sequence: Synthetic peptide
  hsp70-2
AEPINIQTW

SEQ ID NO: 194 - protein, 11 aa, Artificial Sequence
  Description of Artificial Sequence: Synthetic peptide
  MART2
FLEGNEVGKTY

SEQ ID NO: 195 - protein, 9 aa, Artificial Sequence
  Description of Artificial Sequence: Synthetic peptide
  MATN
KTLTSVFQK

SEQ ID NO: 196 - protein, 9 aa, Artificial Sequence
  Description of Artificial Sequence: Synthetic peptide
  ME1
FLDEFMEGV

SEQ ID NO: 197 - protein, 9 aa, Artificial Sequence
  Description of Artificial Sequence: Synthetic peptide
  MUM-1f
EEKLIVVLF

SEQ ID NO: 198 - protein, 11 aa, Artificial Sequence
  Description of Artificial Sequence: Synthetic peptide
  MUM-2
SELFRSGLDSY

SEQ ID NO: 199 - protein, 9 aa, Artificial Sequence
  Description of Artificial Sequence: Synthetic peptide
  MUM-2
FRSGLDSYV

SEQ ID NO: 200 - protein, 9 aa, Artificial Sequence
  Description of Artificial Sequence: Synthetic peptide
  MUM-3
EAFIQPITR

SEQ ID NO: 201 - protein, 12 aa, Artificial Sequence
  Description of Artificial Sequence: Synthetic peptide
  neo-PAP
RVIKNSIRLTLE

SEQ ID NO: 202 - protein, 9 aa, Artificial Sequence
  Description of Artificial Sequence: Synthetic peptide
  Myosin class I
KINKNPKYK

SEQ ID NO: 203 - protein, 8 aa, Artificial Sequence
  Description of Artificial Sequence: Synthetic peptide
  NFYC
QQITKTEV

SEQ ID NO: 204 - protein, 11 aa, Artificial Sequence
  Description of Artificial Sequence: Synthetic peptide
  OGT
SLYKFSPFPLG

SEQ ID NO: 205 - protein, 9 aa, Artificial Sequence
  Description of Artificial Sequence: Synthetic peptide
  OS-9
KELEGILLL

SEQ ID NO: 206 - protein, 9 aa, Artificial Sequence
  Description of Artificial Sequence: Synthetic peptide
  p53
VVPCEPPEV

SEQ ID NO: 207 - protein, 25 aa, Artificial Sequence
  Description of Artificial Sequence: Synthetic peptide
  pml-RARalpha fusion protein
NSNHVASGAGEAAIETQSSSSEEIV

SEQ ID NO: 208 - protein, 9 aa, Artificial Sequence
  Description of Artificial Sequence: Synthetic peptide
  PPP1R3B
YTDFHCQYV

SEQ ID NO: 209 - protein, 10 aa, Artificial Sequence
  Description of Artificial Sequence: Synthetic peptide
  PRDX5
LLLDDLLVSI

SEQ ID NO: 210 - protein, 16 aa, Artificial Sequence
  Description of Artificial Sequence: Synthetic peptide
  PTPRK
PYYFAAELPPRNLPEP

SEQ ID NO: 211 - protein, 9 aa, Artificial Sequence
  Description of Artificial Sequence: Synthetic peptide
  K-ras
VVVGAVGVG

SEQ ID NO: 212 - protein, 10 aa, Artificial Sequence
  Description of Artificial Sequence: Synthetic peptide
  N-ras
ILDTAGREEY

SEQ ID NO: 213 - protein, 9 aa, Artificial Sequence
  Description of Artificial Sequence: Synthetic peptide
  RBAF600
RPHVPESAF

SEQ ID NO: 214 - protein, 9 aa, Artificial Sequence
  Description of Artificial Sequence: Synthetic peptide
  SIRT2
KIFSEVTLK

SEQ ID NO: 215 - protein, 9 aa, Artificial Sequence
  Description of Artificial Sequence: Synthetic peptide
  SNRPD1
SHETVIIEL

SEQ ID NO: 216 - protein, 10 aa, Artificial Sequence
  Description of Artificial Sequence: Synthetic peptide
  SYT-SSX1 or -SSX2 fusion protein
QRPYGYDQIM

SEQ ID NO: 217 - protein, 10 aa, Artificial Sequence
  Description of Artificial Sequence: Synthetic peptide
  TGF-betaRII
RLSSCVPVAG

SEQ ID NO: 218 - protein, 15 aa, Artificial Sequence
  Description of Artificial Sequence: Synthetic peptide
  Triosephosphate isomerase
GELIGILNAAKVPAD

SEQ ID NO: 219 - protein, 9 aa, Artificial Sequence
  Description of Artificial Sequence: Synthetic peptide
  Cyclin-A1
FLDRFLSCM

SEQ ID NO: 220 - protein, 11 aa, Artificial Sequence
  Description of Artificial Sequence: Synthetic peptide
  Cyclin-A1
SLIAAAAFCLA

SEQ ID NO: 221 - protein, 8 aa, Artificial Sequence
  Description of Artificial Sequence: Synthetic peptide
  GAGE-1,2,8
YRPRPRRY

SEQ ID NO: 222 - protein, 9 aa, Artificial Sequence
  Description of Artificial Sequence: Synthetic peptide
  GAGE-3,4,5,6,7
YYWPRPRRY

SEQ ID NO: 223 - protein, 10 aa, Artificial Sequence
  Description of Artificial Sequence: Synthetic peptide
  GnTVf
  MOD_RES (10)..(10): Val or absent
VLPDVFIRCX

SEQ ID NO: 224 - protein, 9 aa, Artificial Sequence
  Description of Artificial Sequence: Synthetic peptide
  HERV-K-MEL
MLAVISCAV

SEQ ID NO: 225 - protein, 9 aa, Artificial Sequence
  Description of Artificial Sequence: Synthetic peptide
  KK-LC-1
RQKRILVNL

SEQ ID NO: 226 - protein, 9 aa, Artificial Sequence
  Description of Artificial Sequence: Synthetic peptide
  KM-HN-1
NYNNFYRFL

SEQ ID NO: 227 - protein, 10 aa, Artificial Sequence
  Description of Artificial Sequence: Synthetic peptide
  KM-HN-1
EYSKECLKEF

SEQ ID NO: 228 - protein, 9 aa, Artificial Sequence
  Description of Artificial Sequence: Synthetic peptide
  KM-HN-1
EYLSLSDKI

SEQ ID NO: 229 - protein, 11 aa, Artificial Sequence
  Description of Artificial Sequence: Synthetic peptide
  LAGE-1
MLMAQEALAFL

SEQ ID NO: 230 - protein, 9 aa, Artificial Sequence
  Description of Artificial Sequence: Synthetic peptide
  LAGE-1
SLLMWITQC

SEQ ID NO: 231 - protein, 10 aa, Artificial Sequence
  Description of Artificial Sequence: Synthetic peptide
  LAGE-1
LAAQERRVPR

SEQ ID NO: 232 - protein, 9 aa, Artificial Sequence
  Description of Artificial Sequence: Synthetic peptide
  LAGE-1
ELVRRILSR

SEQ ID NO: 233 - protein, 9 aa, Artificial Sequence
  Description of Artificial Sequence: Synthetic peptide
  LAGE-1
APRGVRMAV

SEQ ID NO: 234 - protein, 14 aa, Artificial Sequence
  Description of Artificial Sequence: Synthetic peptide
  LAGE-1
SLLMWITQCFLPVF

SEQ ID NO: 235 - protein, 20 aa, Artificial Sequence
  Description of Artificial Sequence: Synthetic peptide
  LAGE-1
QGAMLAAQERRVPRAAEVPR

SEQ ID NO: 236 - protein, 18 aa, Artificial Sequence
  Description of Artificial Sequence: Synthetic peptide
  LAGE-1
AADHRQLQLSISSCLQQL

SEQ ID NO: 237 - protein, 22 aa, Artificial Sequence
  Description of Artificial Sequence: Synthetic peptide
  LAGE-1
CLSRRPWKRSWSAGSCPGMPHL

SEQ ID NO: 238 - protein, 13 aa, Artificial Sequence
  Description of Artificial Sequence: Synthetic peptide
  LAGE-1
ILSRDAAPLPRPG

SEQ ID NO: 239 - protein, 14 aa, Artificial Sequence
  Description of Artificial Sequence: Synthetic peptide
  LAGE-1
AGATGGRGPRGAGA

SEQ ID NO: 240 - protein, 10 aa, Artificial Sequence
  Description of Artificial Sequence: Synthetic peptide
  LY6K
RYCNLEGPPI

SEQ ID NO: 241 - protein, 24 aa, Artificial Sequence
  Description of Artificial Sequence: Synthetic peptide
  LY6K
KWTEPYCVIAAVKIFPRFFMVAKQ

SEQ ID NO: 242 - protein, 20 aa, Artificial Sequence
  Description of Artificial Sequence: Synthetic peptide
  LY6K
KCCKIRYCNLEGPPINSSVF

SEQ ID NO: 243 - protein, 9 aa, Artificial Sequence
  Description of Artificial Sequence: Synthetic peptide
  MAGE-A1
EADPTGHSY

SEQ ID NO: 244 - protein, 9 aa, Artificial Sequence
  Description of Artificial Sequence: Synthetic peptide
  MAGE-A1
SLFRAVITK

SEQ ID NO: 245 - protein, 10 aa, Artificial Sequence
  Description of Artificial Sequence: Synthetic peptide
  MAGE-A1
EVYDGREHSA

SEQ ID NO: 246 - protein, 9 aa, Artificial Sequence
  Description of Artificial Sequence: Synthetic peptide
  MAGE-A1
RVRFFFPSL

SEQ ID NO: 247 - protein, 9 aa, Artificial Sequence
  Description of Artificial Sequence: Synthetic peptide
  MAGE-A1
EADPTGHSY

SEQ ID NO: 248 - protein, 10 aa, Artificial Sequence
  Description of Artificial Sequence: Synthetic peptide
  MAGE-A1
REPVTKAEML

SEQ ID NO: 249 - protein, 10 aa, Artificial Sequence
  Description of Artificial Sequence: Synthetic peptide
  MAGE-A1
KEADPTGHSY

SEQ ID NO: 250 - protein, 9 aa, Artificial Sequence
  Description of Artificial Sequence: Synthetic peptide
  MAGE-A1
DPARYEFLW

SEQ ID NO: 251 - protein, 11 aa, Artificial Sequence
  Description of Artificial Sequence: Synthetic peptide
  MAGE-A1
ITKKVADLVGF

SEQ ID NO: 252 - protein, 9 aa, Artificial Sequence
  Description of Artificial Sequence: Synthetic peptide
  MAGE-A1
SAFPTTINF

SEQ ID NO: 253 - protein, 9 aa, Artificial Sequence
  Description of Artificial Sequence: Synthetic peptide
  MAGE-A1
SAYGEPRKL

SEQ ID NO: 254 - protein, 9 aa, Artificial Sequence
  Description of Artificial Sequence: Synthetic peptide
  MAGE-A1
RVRFFFPSL

SEQ ID NO: 255 - protein, 9 aa, Artificial Sequence
  Description of Artificial Sequence: Synthetic peptide
  MAGE-A1
SAYGEPRKL

SEQ ID NO: 256 - protein, 15 aa, Artificial Sequence
  Description of Artificial Sequence: Synthetic peptide
  MAGE-A1
TSCILESLFRAVITK

SEQ ID NO: 257 - protein, 15 aa, Artificial Sequence
  Description of Artificial Sequence: Synthetic peptide
  MAGE-A1
PRALAETSYVKVLEY

SEQ ID NO: 258 - protein, 16 aa, Artificial Sequence
  Description of Artificial Sequence: Synthetic peptide
  MAGE-A1
FLLLKYRAREPVTKAE

SEQ ID NO: 259 - protein, 12 aa, Artificial Sequence
  Description of Artificial Sequence: Synthetic peptide
  MAGE-A1
EYVIKVSARVRF

SEQ ID NO: 260 - protein, 10 aa, Artificial Sequence
  Description of Artificial Sequence: Synthetic peptide
  MAGE-A2
YLQLVFGIEV

SEQ ID NO: 261 - protein, 9 aa, Artificial Sequence
  Description of Artificial Sequence: Synthetic peptide
  MAGE-A2
EYLQLVFGI

SEQ ID NO: 262 - protein, 10 aa, Artificial Sequence
  Description of Artificial Sequence: Synthetic peptide
  MAGE-A2
REPVTKAEML

SEQ ID NO: 263 - protein, 9 aa, Artificial Sequence
  Description of Artificial Sequence: Synthetic peptide
  MAGE-A2
EGDCAPEEK

SEQ ID NO: 264 - protein, 14 aa, Artificial Sequence
  Description of Artificial Sequence: Synthetic peptide
  MAGE-A2
LLKYRAREPVTKAE

SEQ ID NO: 265 - protein, 9 aa, Artificial Sequence
  Description of Artificial Sequence: Synthetic peptide
  MAGE-A3
EVDPIGHLY

SEQ ID NO: 266 - protein, 10 aa, Artificial Sequence
  Description of Artificial Sequence: Synthetic peptide
  MAGE-A3
FLWGPRALVD

SEQ ID NO: 267 - protein, 9 aa, Artificial Sequence
  Description of Artificial Sequence: Synthetic peptide
  MAGE-A3
KVAELVHFL

SEQ ID NO: 268 - protein, 9 aa, Artificial Sequence
  Description of Artificial Sequence: Synthetic peptide
  MAGE-A3
TFPDLESEF

SEQ ID NO: 269 - protein, 9 aa, Artificial Sequence
  Description of Artificial Sequence: Synthetic peptide
  MAGE-A3
VAELVHFLL

SEQ ID NO: 270 - protein, 10 aa, Artificial Sequence
  Description of Artificial Sequence: Synthetic peptide
  MAGE-A3
MEVDPIGHLY

SEQ ID NO: 271 - protein, 9 aa, Artificial Sequence
  Description of Artificial Sequence: Synthetic peptide
  MAGE-A3
EVDPIGHLY

SEQ ID NO: 272 - protein, 10 aa, Artificial Sequence
  Description of Artificial Sequence: Synthetic peptide
  MAGE-A3
REPVTKAEML

SEQ ID NO: 273 - protein, 10 aa, Artificial Sequence
  Description of Artificial Sequence: Synthetic peptide
  MAGE-A3
AELVHFLLLI

SEQ ID NO: 274 - protein, 10 aa, Artificial Sequence
  Description of Artificial Sequence: Synthetic peptide
  MAGE-A3
MEVDPIGHLY

SEQ ID NO: 275 - protein, 9 aa, Artificial Sequence
  Description of Artificial Sequence: Synthetic peptide
  MAGE-A3
WQYFFPVIF

SEQ ID NO: 276 - protein, 9 aa, Artificial Sequence
  Description of Artificial Sequence: Synthetic peptide
  MAGE-A3
EGDCAPEEK

SEQ ID NO: 277 - protein, 16 aa, Artificial Sequence
  Description of Artificial Sequence: Synthetic peptide
  MAGE-A3
KKLLTQHFVQENYLEY

SEQ ID NO: 278 - protein, 15 aa, Artificial Sequence
  Description of Artificial Sequence: Synthetic peptide
  MAGE-A3
RKVAELVHFLLLKYR

SEQ ID NO: 279 - protein, 16 aa, Artificial Sequence
  Description of Artificial Sequence: Synthetic peptide
  MAGE-A3
KKLLTQHFVQENYLEY

SEQ ID NO: 280 - protein, 16 aa, Artificial Sequence
  Description of Artificial Sequence: Synthetic peptide
  MAGE-A3
ACYEFLWGPRALVETS

SEQ ID NO: 281 - protein, 15 aa, Artificial Sequence
  Description of Artificial Sequence: Synthetic peptide
  MAGE-A3
RKVAELVHFLLLKYR

SEQ ID NO: 282 - protein, 12 aa, Artificial Sequence
  Description of Artificial Sequence: Synthetic peptide
  MAGE-A3
VIFSKASSSLQL

SEQ ID NO: 283 - protein, 15 aa, Artificial Sequence
  Description of Artificial Sequence: Synthetic peptide
  MAGE-A3
VFGIELMEVDPIGHL

SEQ ID NO: 284 - protein, 15 aa, Artificial Sequence
  Description of Artificial Sequence: Synthetic peptide
  MAGE-A3
GDNQIMPKAGLLIIV

SEQ ID NO: 285 - protein, 15 aa, Artificial Sequence
  Description of Artificial Sequence: Synthetic peptide
  MAGE-A3
TSYVKVLHHMVKISG

SEQ ID NO: 286 - protein, 16 aa, Artificial Sequence
  Description of Artificial Sequence: Synthetic peptide
  MAGE-A3
RKVAELVHFLLLKYRA

SEQ ID NO: 287 - protein, 16 aa, Artificial Sequence
  Description of Artificial Sequence: Synthetic peptide
  MAGE-A3
FLLLKYRAREPVTKAE

SEQ ID NO: 288 - protein, 9 aa, Artificial Sequence
  Description of Artificial Sequence: Synthetic peptide
  MAGE-A4
EVDPASNTY

SEQ ID NO: 289 - protein, 10 aa, Artificial Sequence
  Description of Artificial Sequence: Synthetic peptide
  MAGE-A4
GVYDGREHTV

SEQ ID NO: 290 - protein, 9 aa, Artificial Sequence
  Description of Artificial Sequence: Synthetic peptide
  MAGE-A4
NYKRCFPVI

SEQ ID NO: 291 - protein, 8 aa, Artificial Sequence
  Description of Artificial Sequence: Synthetic peptide
  MAGE-A4
SESLKMIF

SEQ ID NO: 292 - protein, 9 aa, Artificial Sequence
  Description of Artificial Sequence: Synthetic peptide
  MAGE-A6
MVKISGGPR

SEQ ID NO: 293 - protein, 9 aa, Artificial Sequence
  Description of Artificial Sequence: Synthetic peptide
  MAGE-A6
EVDPIGHVY

SEQ ID NO: 294 - protein, 10 aa, Artificial Sequence
  Description of Artificial Sequence: Synthetic peptide
  MAGE-A6
REPVTKAEML

SEQ ID NO: 295 - protein, 9 aa, Artificial Sequence
  Description of Artificial Sequence: Synthetic peptide
  MAGE-A6
EGDCAPEEK

SEQ ID NO: 296 - protein, 9 aa, Artificial Sequence
  Description of Artificial Sequence: Synthetic peptide
  MAGE-A6
ISGGPRISY

SEQ ID NO: 297 - protein, 14 aa, Artificial Sequence
  Description of Artificial Sequence: Synthetic peptide
  MAGE-A6
LLKYRAREPVTKAE

SEQ ID NO: 298 - protein, 9 aa, Artificial Sequence
  Description of Artificial Sequence: Synthetic peptide
  MAGE-A9
ALSVMGVYV

SEQ ID NO: 299 - protein, 10 aa, Artificial Sequence
  Description of Artificial Sequence: Synthetic peptide
  MAGE-A10
GLYDGMEHLL

SEQ ID NO: 300 - protein, 9 aa, Artificial Sequence
  Description of Artificial Sequence: Synthetic peptide
  MAGE-A10
DPARYEFLW

SEQ ID NO: 301 - protein, 10 aa, Artificial Sequence
  Description of Artificial Sequence: Synthetic peptide
  MAGE-A12 m
FLWGPRALVE

SEQ ID NO: 302 - protein, 9 aa, Artificial Sequence
  Description of Artificial Sequence: Synthetic peptide
  MAGE-A12 m
VRIGHLYIL

SEQ ID NO: 303 - protein, 9 aa, Artificial Sequence
  Description of Artificial Sequence: Synthetic peptide
  MAGE-A12 m
EGDCAPEEK

SEQ ID NO: 304 - protein, 15 aa, Artificial Sequence
  Description of Artificial Sequence: Synthetic peptide
  MAGE-A12 m
REPFTKAEMLGSVIR

SEQ ID NO: 305 - protein, 14 aa, Artificial Sequence
  Description of Artificial Sequence: Synthetic peptide
  MAGE-A12 m
AELVHFLLLKYRAR

SEQ ID NO: 306 - protein, 10 aa, Artificial Sequence
  Description of Artificial Sequence: Synthetic peptide
  MAGE-C1
ILFGISLREV

SEQ ID NO: 307 - protein, 9 aa, Artificial Sequence
  Description of Artificial Sequence: Synthetic peptide
  MAGE-C1
KVVEFLAML

SEQ ID NO: 308 - protein, 13 aa, Artificial Sequence
  Description of Artificial Sequence: Synthetic peptide
  MAGE-C1
SSALLSIFQSSPE

SEQ ID NO: 309 - protein, 9 aa, Artificial Sequence
  Description of Artificial Sequence: Synthetic peptide
  MAGE-C1
SFSYTLLSL

SEQ ID NO: 310 - protein, 9 aa, Artificial Sequence
  Description of Artificial Sequence: Synthetic peptide
  MAGE-C1
VSSFFSYTL

SEQ ID NO: 311 - protein, 10 aa, Artificial Sequence
  Description of Artificial Sequence: Synthetic peptide
  MAGE-C2
LLFGLALIEV

SEQ ID NO: 312 - protein, 9 aa, Artificial Sequence
  Description of Artificial Sequence: Synthetic peptide
  MAGE-C2
ALKDVEERV

SEQ ID NO: 313 - protein, 9 aa, Artificial Sequence
  Description of Artificial Sequence: Synthetic peptide
  MAGE-C2
SESIKKKVL

SEQ ID NO: 314 - protein, 9 aa, Artificial Sequence
  Description of Artificial Sequence: Synthetic peptide
  MAGE-C2
ASSTLYLVF

SEQ ID NO: 315 - protein, 15 aa, Artificial Sequence
  Description of Artificial Sequence: Synthetic peptide
  MAGE-C2
SSTLYLVFSPSSFST

SEQ ID NO: 316 - protein, 20 aa, Artificial Sequence
  Description of Artificial Sequence: Synthetic peptide
  mucink
PDTRPAPGSTAPPAHGVTSA

SEQ ID NO: 317 - protein, 9 aa, Artificial Sequence
  Description of Artificial Sequence: Synthetic peptide
  NA88-A
QGQHFLQKV

SEQ ID NO: 318 - protein, 9 aa, Artificial Sequence
  Description of Artificial Sequence: Synthetic peptide
  NY-ESO-1 / LAGE-2
SLLMWITQC

SEQ ID NO: 319 - protein, 11 aa, Artificial Sequence
  Description of Artificial Sequence: Synthetic peptide
  NY-ESO-1 / LAGE-2
MLMAQEALAFL

SEQ ID NO: 320 - protein, 11 aa, Artificial Sequence
  Description of Artificial Sequence: Synthetic peptide
  NY-ESO-1 / LAGE-2
YLAMPFATPME

SEQ ID NO: 321 - protein, 10 aa, Artificial Sequence
  Description of Artificial Sequence: Synthetic peptide
  NY-ESO-1 / LAGE-2
ASGPGGGAPR

SEQ ID NO: 322 - protein, 10 aa, Artificial Sequence
  Description of Artificial Sequence: Synthetic peptide
  NY-ESO-1 / LAGE-2
LAAQERRVPR

SEQ ID NO: 323 - protein, 10 aa, Artificial Sequence
  Description of Artificial Sequence: Synthetic peptide
  NY-ESO-1 / LAGE-2
TVSGNILTIR

SEQ ID NO: 324 - protein, 13 aa, Artificial Sequence
  Description of Artificial Sequence: Synthetic peptide
  NY-ESO-1 / LAGE-2
APRGPHGGAASGL

SEQ ID NO: 325 - protein, 11 aa, Artificial Sequence
  Description of Artificial Sequence: Synthetic peptide
  NY-ESO-1 / LAGE-2
MPFATPMEAEL

SEQ ID NO: 326 - protein, 12 aa, Artificial Sequence
  Description of Artificial Sequence: Synthetic peptide
  NY-ESO-1 / LAGE-2
KEFTVSGNILTI

SEQ ID NO: 327 - protein, 9 aa, Artificial Sequence
  Description of Artificial Sequence: Synthetic peptide
  NY-ESO-1 / LAGE-2
MPFATPMEA

SEQ ID NO: 328 - protein, 9 aa, Artificial Sequence
  Description of Artificial Sequence: Synthetic peptide
  NY-ESO-1 / LAGE-2
FATPMEAEL

SEQ ID NO: 329 - protein, 11 aa, Artificial Sequence
  Description of Artificial Sequence: Synthetic peptide
  NY-ESO-1 / LAGE-2
FATPMEAELAR

SEQ ID NO: 330 - protein, 9 aa, Artificial Sequence
  Description of Artificial Sequence: Synthetic peptide
  NY-ESO-1 / LAGE-2
LAMPFATPM

SEQ ID NO: 331 - protein, 9 aa, Artificial Sequence
  Description of Artificial Sequence: Synthetic peptide
  NY-ESO-1 / LAGE-2
ARGPESRLL

SEQ ID NO: 332 - protein, 14 aa, Artificial Sequence
  Description of Artificial Sequence: Synthetic peptide
  NY-ESO-1 / LAGE-2
SLLMWITQCFLPVF

SEQ ID NO: 333 - protein, 25 aa, Artificial Sequence
  Description of Artificial Sequence: Synthetic peptide
  NY-ESO-1 / LAGE-2
LLEFYLAMPFATPMEAELARRSLAQ

SEQ ID NO: 334 - protein, 12 aa, Artificial Sequence
  Description of Artificial Sequence: Synthetic peptide
  NY-ESO-1 / LAGE-2
EFYLAMPFATPM

SEQ ID NO: 335 - protein, 25 aa, Artificial Sequence
  Description of Artificial Sequence: Synthetic peptide
  NY-ESO-1 / LAGE-2
PGVLLKEFTVSGNILTIRLTAADHR

SEQ ID NO: 336 - protein, 12 aa, Artificial Sequence
  Description of Artificial Sequence: Synthetic peptide
  NY-ESO-1 / LAGE-2
RLLEFYLAMPFA

SEQ ID NO: 337 - protein, 20 aa, Artificial Sequence
  Description of Artificial Sequence: Synthetic peptide
  NY-ESO-1 / LAGE-2
QGAMLAAQERRVPRAAEVPR

SEQ ID NO: 338 - protein, 13 aa, Artificial Sequence
  Description of Artificial Sequence: Synthetic peptide
  NY-ESO-1 / LAGE-2
PFATPMEAELARR

SEQ ID NO: 339 - protein, 20 aa, Artificial Sequence
  Description of Artificial Sequence: Synthetic peptide
  NY-ESO-1 / LAGE-2
PGVLLKEFTVSGNILTIRLT

SEQ ID NO: 340 - protein, 10 aa, Artificial Sequence
  Description of Artificial Sequence: Synthetic peptide
  NY-ESO-1 / LAGE-2
VLLKEFTVSG

SEQ ID NO: 341 - protein, 18 aa, Artificial Sequence
  Description of Artificial Sequence: Synthetic peptide
  NY-ESO-1 / LAGE-2
AADHRQLQLSISSCLQQL

SEQ ID NO: 342 - protein, 25 aa, Artificial Sequence
  Description of Artificial Sequence: Synthetic peptide
  NY-ESO-1 / LAGE-2
LLEFYLAMPFATPMEAELARRSLAQ

SEQ ID NO: 343 - protein, 15 aa, Artificial Sequence
  Description of Artificial Sequence: Synthetic peptide
  NY-ESO-1 / LAGE-2
LKEFTVSGNILTIRL

SEQ ID NO: 344 - protein, 25 aa, Artificial Sequence
  Description of Artificial Sequence: Synthetic peptide
  NY-ESO-1 / LAGE-2
PGVLLKEFTVSGNILTIRLTAADHR

SEQ ID NO: 345 - protein, 11 aa, Artificial Sequence
  Description of Artificial Sequence: Synthetic peptide
  NY-ESO-1 / LAGE-2
KEFTVSGNILT

SEQ ID NO: 346 - protein, 14 aa, Artificial Sequence
  Description of Artificial Sequence: Synthetic peptide
  NY-ESO-1 / LAGE-2
LLEFYLAMPFATPM

SEQ ID NO: 347 - protein, 14 aa, Artificial Sequence
  Description of Artificial Sequence: Synthetic peptide
  NY-ESO-1 / LAGE-2
AGATGGRGPRGAGA

SEQ ID NO: 348 - protein, 9 aa, Artificial Sequence
  Description of Artificial Sequence: Synthetic peptide
  SAGE
LYATVIHDI

SEQ ID NO: 349 - protein, 9 aa, Artificial Sequence
  Description of Artificial Sequence: Synthetic peptide
  Sp17
ILDSSEEDK

SEQ ID NO: 350 - protein, 9 aa, Artificial Sequence
  Description of Artificial Sequence: Synthetic peptide
  SSX-2
KASEKIFYV

SEQ ID NO: 351 - protein, 16 aa, Artificial Sequence
  Description of Artificial Sequence: Synthetic peptide
  SSX-2
EKIQKAFDDIAKYFSK

SEQ ID NO: 352 - protein, 11 aa, Artificial Sequence
  Description of Artificial Sequence: Synthetic peptide
  SSX-2
FGRLQGISPKI

SEQ ID NO: 353 - protein, 18 aa, Artificial Sequence
  Description of Artificial Sequence: Synthetic peptide
  SSX-2
WEKMKASEKIFYVYMKRK

SEQ ID NO: 354 - protein, 15 aa, Artificial Sequence
  Description of Artificial Sequence: Synthetic peptide
  SSX-2
KIFYVYMKRKYEAMT

SEQ ID NO: 355 - protein, 14 aa, Artificial Sequence
  Description of Artificial Sequence: Synthetic peptide
  SSX-2
KIFYVYMKRKYEAM

SEQ ID NO: 356 - protein, 20 aa, Artificial Sequence
  Description of Artificial Sequence: Synthetic peptide
  SSX-4
INKTSGPKRGKHAWTHRLRE

SEQ ID NO: 357 - protein, 20 aa, Artificial Sequence
  Description of Artificial Sequence: Synthetic peptide
  SSX-4
YFSKKEWEKMKSSEKIVYVY

SEQ ID NO: 358 - protein, 20 aa, Artificial Sequence
  Description of Artificial Sequence: Synthetic peptide
  SSX-4
MKLNYEVMTKLGFKVTLPPF

SEQ ID NO: 359 - protein, 20 aa, Artificial Sequence
  Description of Artificial Sequence: Synthetic peptide
  SSX-4
KHAWTHRLRERKQLVVYEEI

SEQ ID NO: 360 - protein, 20 aa, Artificial Sequence
  Description of Artificial Sequence: Synthetic peptide
  SSX-4
LGFKVTLPPFMRSKRAADFH

SEQ ID NO: 361 - protein, 20 aa, Artificial Sequence
  Description of Artificial Sequence: Synthetic peptide
  SSX-4
KSSEKIVYVYMKLNYEVMTK

SEQ ID NO: 362 - protein, 20 aa, Artificial Sequence
  Description of Artificial Sequence: Synthetic peptide
  SSX-4
KHAWTHRLRERKQLVVYEEI

SEQ ID NO: 363 - protein, 9 aa, Artificial Sequence
  Description of Artificial Sequence: Synthetic peptide
  TAG-1
SLGWLFLLL

SEQ ID NO: 364 - protein, 9 aa, Artificial Sequence
  Description of Artificial Sequence: Synthetic peptide
  TAG-1
LSRLSNRLL

SEQ ID NO: 365 - protein, 15 aa, Artificial Sequence
  Description of Artificial Sequence: Synthetic peptide
  TRAG-3
CEFHACWPAFTVLGE

SEQ ID NO: 366 - protein, 15 aa, Artificial Sequence
  Description of Artificial Sequence: Synthetic peptide
  TRAG-3
CEFHACWPAFTVLGE

SEQ ID NO: 367 - protein, 10 aa, Artificial Sequence
  Description of Artificial Sequence: Synthetic peptide
  TRP2-INT2g
EVISCKLIKR

SEQ ID NO: 368 - protein, 9 aa, Artificial Sequence
  Description of Artificial Sequence: Synthetic peptide
  XAGE-1b/GAGED2a
RQKKIRIQL

SEQ ID NO: 369 - protein, 16 aa, Artificial Sequence
  Description of Artificial Sequence: Synthetic peptide
  XAGE-1b/GAGED2a
HLGSRQKKIRIQLRSQ

SEQ ID NO: 370 - protein, 17 aa, Artificial Sequence
  Description of Artificial Sequence: Synthetic peptide
  XAGE-1b/GAGED2a
CATWKVICKSCISQTPG

SEQ ID NO: 371 - protein, 10 aa, Artificial Sequence
  Description of Artificial Sequence: Synthetic peptide
  CEA
YLSGANLNLG

SEQ ID NO: 372 - protein, 9 aa, Artificial Sequence
  Description of Artificial Sequence: Synthetic peptide
  CEA
IMIGVLVGV

SEQ ID NO: 373 - protein, 9 aa, Artificial Sequence
  Description of Artificial Sequence: Synthetic peptide
  CEA
GVLVGVALI

SEQ ID NO: 374 - protein, 9 aa, Artificial Sequence
  Description of Artificial Sequence: Synthetic peptide
  CEA
HLFGYSWYK

SEQ ID NO: 375 - protein, 10 aa, Artificial Sequence
  Description of Artificial Sequence: Synthetic peptide
  CEA
QYSWFVNGTF

SEQ ID NO: 376 - protein, 9 aa, Artificial Sequence
  Description of Artificial Sequence: Synthetic peptide
  CEA
TYACFVSNL

SEQ ID NO: 377 - protein, 15 aa, Artificial Sequence
  Description of Artificial Sequence: Synthetic peptide
  CEA
AYVCGIQNSVSANRS

SEQ ID NO: 378 - protein, 25 aa, Artificial Sequence
  Description of Artificial Sequence: Synthetic peptide
  CEA
DTGFYTLHVIKSDLVNEEATGQFRV

SEQ ID NO: 379 - protein, 15 aa, Artificial Sequence
  Description of Artificial Sequence: Synthetic peptide
  CEA
YSWRINGIPQQHTQV

SEQ ID NO: 380 - protein, 13 aa, Artificial Sequence
  Description of Artificial Sequence: Synthetic peptide
  CEA
TYYRPGVNLSLSC

SEQ ID NO: 381 - protein, 13 aa, Artificial Sequence
  Description of Artificial Sequence: Synthetic peptide
  CEA
EIIYPNASLLIQN

SEQ ID NO: 382 - protein, 15 aa, Artificial Sequence
  Description of Artificial Sequence: Synthetic peptide
  CEA
YACFVSNLATGRNNS

SEQ ID NO: 383 - protein, 13 aa, Artificial Sequence
  Description of Artificial Sequence: Synthetic peptide
  CEA
LWWVNNQSLPVSP

SEQ ID NO: 384 - protein, 13 aa, Artificial Sequence
  Description of Artificial Sequence: Synthetic peptide
  CEA
EIIYPNASLLIQN

SEQ ID NO: 385 - protein, 13 aa, Artificial Sequence
  Description of Artificial Sequence: Synthetic peptide
  CEA
NSIVKSITVSASG

SEQ ID NO: 386 - protein, 9 aa, Artificial Sequence
  Description of Artificial Sequence: Synthetic peptide
  gp100 / Pmel17
KTWGQYWQV

SEQ ID NO: 387 - protein, 10 aa, Artificial Sequence
  Description of Artificial Sequence: Synthetic peptide
  gp100 / Pmel17
  MOD_RES (1)..(1): Ala or absent
XMLGTHTMEV

SEQ ID NO: 388 - protein, 9 aa, Artificial Sequence
  Description of Artificial Sequence: Synthetic peptide
  gp100 / Pmel17
ITDQVPFSV

SEQ ID NO: 389 - protein, 9 aa, Artificial Sequence
  Description of Artificial Sequence: Synthetic peptide
  gp100 / Pmel17
YLEPGPVTA

SEQ ID NO: 390 - protein, 10 aa, Artificial Sequence
  Description of Artificial Sequence: Synthetic peptide
  gp100 / Pmel17
LLDGTATLRL

SEQ ID NO: 391 - protein, 10 aa, Artificial Sequence
  Description of Artificial Sequence: Synthetic peptide
  gp100 / Pmel17
VLYRYGSFSV

SEQ ID NO: 392 - protein, 10 aa, Artificial Sequence
  Description of Artificial Sequence: Synthetic peptide
  gp100 / Pmel17
SLADTNSLAV

SEQ ID NO: 393 - protein, 9 aa, Artificial Sequence
  Description of Artificial Sequence: Synthetic peptide
  gp100 / Pmel17
RLMKQDFSV

SEQ ID NO: 394 - protein, 9 aa, Artificial Sequence
  Description of Artificial Sequence: Synthetic peptide
  gp100 / Pmel17
RLPRIFCSC

SEQ ID NO: 395 - protein, 9 aa, Artificial Sequence
  Description of Artificial Sequence: Synthetic peptide
  gp100 / Pmel17
LIYRRRLMK

SEQ ID NO: 396 - protein, 9 aa, Artificial Sequence
  Description of Artificial Sequence: Synthetic peptide
  gp100 / Pmel17
ALLAVGATK

SEQ ID NO: 397 - protein, 10 aa, Artificial Sequence
  Description of Artificial Sequence: Synthetic peptide
  gp100 / Pmel17
IALNFPGSQK

SEQ ID NO: 398 - protein, 9 aa, Artificial Sequence
  Description of Artificial Sequence: Synthetic peptide
  gp100 / Pmel17
RSYVPLAHR

SEQ ID NO: 399 - protein, 9 aa, Artificial Sequence
  Description of Artificial Sequence: Synthetic peptide
  gp100 / Pmel17
ALNFPGSQK

SEQ ID NO: 400 - protein, 9 aa, Artificial Sequence
  Description of Artificial Sequence: Synthetic peptide
  gp100 / Pmel17
VYFFLPDHL

SEQ ID NO: 401 - protein, 9 aa, Artificial Sequence
  Description of Artificial Sequence: Synthetic peptide
  gp100 / Pmel17
RTKQLYPEW

SEQ ID NO: 402 - protein, 10 aa, Artificial Sequence
  Description of Artificial Sequence: Synthetic peptide
  gp100 / Pmel17
HTMEVTVYHR

SEQ ID NO: 403 - protein, 9 aa, Artificial Sequence
  Description of Artificial Sequence: Synthetic peptide
  gp100 / Pmel17
SSPGCQPPA

SEQ ID NO: 404 - protein, 10 aa, Artificial Sequence
  Description of Artificial Sequence: Synthetic peptide
  gp100 / Pmel17
VPLDCVLYRY

SEQ ID NO: 405 - protein, 9 aa, Artificial Sequence
  Description of Artificial Sequence: Synthetic peptide
  gp100 / Pmel17
LPHSSSHWL

SEQ ID NO: 406 - protein, 8 aa, Artificial Sequence
  Description of Artificial Sequence: Synthetic peptide
  gp100 / Pmel17
SNDGPTLI

SEQ ID NO: 407 - protein, 15 aa, Artificial Sequence
  Description of Artificial Sequence: Synthetic peptide
  gp100 / Pmel17
GRAMLGTHTMEVTVY

SEQ ID NO: 408 - protein, 16 aa, Artificial Sequence
  Description of Artificial Sequence: Synthetic peptide
  gp100 / Pmel17
WNRQLYPEWTEAQRLD

SEQ ID NO: 409 - protein, 18 aa, Artificial Sequence
  Description of Artificial Sequence: Synthetic peptide
  gp100 / Pmel17
TTEWVETTARELPIPEPE

SEQ ID NO: 410 - protein, 17 aa, Artificial Sequence
  Description of Artificial Sequence: Synthetic peptide
  gp100 / Pmel17
TGRAMLGTHTMEVTVYH

SEQ ID NO: 411 - protein, 9 aa, Artificial Sequence
  Description of Artificial Sequence: Synthetic peptide
  mammaglobin-A
PLLENVISK

SEQ ID NO: 412 - protein, 30 aa, Artificial Sequence
  Description of Artificial Sequence: Synthetic polypeptide
  Melan-A / MART-1
YTTAEEAAGIGILTVILGVLLLIGCWYCRR

SEQ ID NO: 413 - protein, 14 aa, Artificial Sequence
  Description of Artificial Sequence: Synthetic peptide
  Melan-A / MART-1
AAGIGILTVILGVL

SEQ ID NO: 414 - protein, 14 aa, Artificial Sequence
  Description of Artificial Sequence: Synthetic peptide
  Melan-A / MART-1
APPAYEKLPSAEQF

SEQ ID NO: 415 - protein, 23 aa, Artificial Sequence
  Description of Artificial Sequence: Synthetic peptide
  Melan-A / MART-1
RNGYRALMDKSLHVGTQCALTRR

SEQ ID NO: 416 - protein, 20 aa, Artificial Sequence
  Description of Artificial Sequence: Synthetic peptide
  Melan-A / MART-1
MPREDAHFIYGYPKKGHGHS

SEQ ID NO: 417 - protein, 20 aa, Artificial Sequence
  Description of Artificial Sequence: Synthetic peptide
  Melan-A / MART-1
KNCEPVVPNAPPAYEKLSAE

SEQ ID NO: 418 - protein, 9 aa, Artificial Sequence
  Description of Artificial Sequence: Synthetic peptide
  NY-BR-1
SLSKILDTV

SEQ ID NO: 419 - protein, 9 aa, Artificial Sequence
  Description of Artificial Sequence: Synthetic peptide
  OA1
LYSACFWWL

SEQ ID NO: 420 - protein, 9 aa, Artificial Sequence
  Description of Artificial Sequence: Synthetic peptide
  PAP
FLFLLFFWL

SEQ ID NO: 421 - protein, 9 aa, Artificial Sequence
  Description of Artificial Sequence: Synthetic peptide
  PAP
TLMSAMTNL

SEQ ID NO: 422 - protein, 9 aa, Artificial Sequence
  Description of Artificial Sequence: Synthetic peptide
  PAP
ALDVYNGLL

SEQ ID NO: 423 - protein, 10 aa, Artificial Sequence
  Description of Artificial Sequence: Synthetic peptide
  PSA
FLTPKKLQCV

SEQ ID NO: 424 - protein, 10 aa, Artificial Sequence
  Description of Artificial Sequence: Synthetic peptide
  PSA
VISNDVCAQV

SEQ ID NO: 425 - protein, 9 aa, Artificial Sequence
  Description of Artificial Sequence: Synthetic peptide
  RAB38 / NY-MEL-1
VLHWDPETV

SEQ ID NO: 426 - protein, 9 aa, Artificial Sequence
  Description of Artificial Sequence: Synthetic peptide
  TRP-1 / gp75
MSLQRQFLR

SEQ ID NO: 427 - protein, 21 aa, Artificial Sequence
  Description of Artificial Sequence: Synthetic peptide
  TRP-1 / gp75
ISPNSVFSQWRVVCDSLEDYD

SEQ ID NO: 428 - protein, 10 aa, Artificial Sequence
  Description of Artificial Sequence: Synthetic peptide
  TRP-1 / gp75
SLPYWNFATG

SEQ ID NO: 429 - protein, 15 aa, Artificial Sequence
  Description of Artificial Sequence: Synthetic peptide
  TRP-1 / gp75
SQWRVVCDSLEDYDT

SEQ ID NO: 430 - protein, 9 aa, Artificial Sequence
  Description of Artificial Sequence: Synthetic peptide
  TRP-2
SVYDFFVWL

SEQ ID NO: 431 - protein, 9 aa, Artificial Sequence
  Description of Artificial Sequence: Synthetic peptide
  TRP-2
TLDSQVMSL

SEQ ID NO: 432 - protein, 9 aa, Artificial Sequence
  Description of Artificial Sequence: Synthetic peptide
  TRP-2
LLGPGRPYR

SEQ ID NO: 433 - protein, 9 aa, Artificial Sequence
  Description of Artificial Sequence: Synthetic peptide
  TRP-2
ANDPIFVVL

SEQ ID NO: 434 - protein, 15 aa, Artificial Sequence
  Description of Artificial Sequence: Synthetic peptide
  TRP-2
QCTEVRADTRPWSGP

SEQ ID NO: 435 - protein, 10 aa, Artificial Sequence
  Description of Artificial Sequence: Synthetic peptide
  TRP-2
ALPYWNFATG

SEQ ID NO: 436 - protein, 9 aa, Artificial Sequence
  Description of Artificial Sequence: Synthetic peptide
  tyrosinase
KCDICTDEY

SEQ ID NO: 437 - protein, 11 aa, Artificial Sequence
  Description of Artificial Sequence: Synthetic peptide
  tyrosinase
SSDYVIPIGTY

SEQ ID NO: 438 - protein, 9 aa, Artificial Sequence
  Description of Artificial Sequence: Synthetic peptide
  tyrosinase
MLLAVLYCL

SEQ ID NO: 439 - protein, 10 aa, Artificial Sequence
  Description of Artificial Sequence: Synthetic peptide
  tyrosinase
CLLWSFQTSA

SEQ ID NO: 440 - protein, 9 aa, Artificial Sequence
  Description of Artificial Sequence: Synthetic peptide
  tyrosinase
YMDGTMSQV

SEQ ID NO: 441 - protein, 9 aa, Artificial Sequence
  Description of Artificial Sequence: Synthetic peptide
  tyrosinase
AFLPWHRLF

SEQ ID NO: 442 - protein, 11 aa, Artificial Sequence
  Description of Artificial Sequence: Synthetic peptide
  tyrosinase
IYMDGTADFSF

SEQ ID NO: 443 - protein, 9 aa, Artificial Sequence
  Description of Artificial Sequence: Synthetic peptide
  tyrosinase
QCSGNFMGF

SEQ ID NO: 444 - protein, 12 aa, Artificial Sequence
  Description of Artificial Sequence: Synthetic peptide
  tyrosinase
TPRLPSSADVEF

SEQ ID NO: 445 - protein, 9 aa, Artificial Sequence
  Description of Artificial Sequence: Synthetic peptide
  tyrosinase
LPSSADVEF

SEQ ID NO: 446 - protein, 10 aa, Artificial Sequence
  Description of Artificial Sequence: Synthetic peptide
  tyrosinase
LHHAFVDSIF

SEQ ID NO: 447 - protein, 10 aa, Artificial Sequence
  Description of Artificial Sequence: Synthetic peptide
  tyrosinase
SEIWRDIDFD

SEQ ID NO: 448 - protein, 15 aa, Artificial Sequence
  Description of Artificial Sequence: Synthetic peptide
  tyrosinase
QNILLSNAPLGPQFP

SEQ ID NO: 449 - protein, 13 aa, Artificial Sequence
  Description of Artificial Sequence: Synthetic peptide
  tyrosinase
SYLQDSDPDSFQD

SEQ ID NO: 450 - protein, 21 aa, Artificial Sequence [sequence omitted]

SEQ ID NO: 451 - protein, 9 aa, Artificial Sequence
  Description of Artificial Sequence: Synthetic peptide
  adipophilin
SVASTITGV

SEQ ID NO: 452 - protein, 10 aa, Artificial Sequence
  Description of Artificial Sequence: Synthetic peptide
  AIM-2
RSDSGQQARY

SEQ ID NO: 453 - protein, 9 aa, Artificial Sequence
  Description of Artificial Sequence: Synthetic peptide
  ALDH1A1
LLYKLADLI

SEQ ID NO: 454 - protein, 10 aa, Artificial Sequence
  Description of Artificial Sequence: Synthetic peptide
  BCLX(L)
YLNDHLEPWI

SEQ ID NO: 455 - protein, 9 aa, Artificial Sequence
  Description of Artificial Sequence: Synthetic peptide
  BING-4
CQWGRLWQL

SEQ ID NO: 456 - protein, 10 aa, Artificial Sequence
  Description of Artificial Sequence: Synthetic peptide
  CALCA
VLLQAGSLHA

SEQ ID NO: 457 - protein, 9 aa, Artificial Sequence
  Description of Artificial Sequence: Synthetic peptide
  CD45
KFLDALISL

SEQ ID NO: 458 - protein, 9 aa, Artificial Sequence
  Description of Artificial Sequence: Synthetic peptide
  CD274
LLNAFTVTV

SEQ ID NO: 459 - protein, 9 aa, Artificial Sequence
  Description of Artificial Sequence: Synthetic peptide
  CPSF
KVHPVIWSL

SEQ ID NO: 460 - protein, 10 aa, Artificial Sequence
  Description of Artificial Sequence: Synthetic peptide
  peptide
LMLQNALTTM

SEQ ID NO: 461 - protein, 9 aa, Artificial Sequence
  Description of Artificial Sequence: Synthetic peptide
  cyclinD1
LLGATCMFV

SEQ ID NO: 462 - protein, 15 aa, Artificial Sequence
  Description of Artificial Sequence: Synthetic peptide
  peptide
NPPSMVAAGSVVAAV

SEQ ID NO: 463 - protein, 10 aa, Artificial Sequence
  Description of Artificial Sequence: Synthetic peptide
  DKK1
ALGGHPLLGV

SEQ ID NO: 464 - protein, 9 aa, Artificial Sequence
  Description of Artificial Sequence: Synthetic peptide
  ENAH(hMena)
TMNGSKSPV

SEQ ID NO: 465 - protein, 9 aa, Artificial Sequence
  Description of Artificial Sequence: Synthetic peptide
  EpCAM
RYQLDPKFI

SEQ ID NO: 466 - protein, 12 aa, Artificial Sequence
  Description of Artificial Sequence: Synthetic peptide
  EphA3
DVTFNIICKKCG

SEQ ID NO: 467 - protein, 9 aa, Artificial Sequence
  Description of Artificial Sequence: Synthetic peptide
  EZH2
FMVEDETVL

SEQ ID NO: 468 - protein, 10 aa, Artificial Sequence
  Description of Artificial Sequence: Synthetic peptide
  FGF5
NTYASPRFKF

SEQ ID NO: 469 - protein, 9 aa, Artificial Sequence
  Description of Artificial Sequence: Synthetic peptide
  glypican-3
FVGEFFTDV

SEQ ID NO: 470 - protein, 9 aa, Artificial Sequence
  Description of Artificial Sequence: Synthetic peptide
  G250 / MN / CAIX
HLSTAFARV

SEQ ID NO: 471 - protein, 9 aa, Artificial Sequence
  Description of Artificial Sequence: Synthetic peptide
  HER-2 / neu
KIFGSLAFL

SEQ ID NO: 472 - protein, 9 aa, Artificial Sequence
  Description of Artificial Sequence: Synthetic peptide
  HER-2 / neu
IISAVVGIL

SEQ ID NO: 473 - protein, 9 aa, Artificial Sequence
  Description of Artificial Sequence: Synthetic peptide
  HER-2 / neu
ALCRWGLLL

SEQ ID NO: 474 - protein, 9 aa, Artificial Sequence
  Description of Artificial Sequence: Synthetic peptide
  HER-2 / neu
ILHNGAYSL

SEQ ID NO: 475 - protein, 9 aa, Artificial Sequence
  Description of Artificial Sequence: Synthetic peptide
  HER-2 / neu
RLLQETELV

SEQ ID NO: 476 - protein, 9 aa, Artificial Sequence
  Description of Artificial Sequence: Synthetic peptide
  HER-2 / neu
VVLGVVFGI

SEQ ID NO: 477 - protein, 10 aa, Artificial Sequence
  Description of Artificial Sequence: Synthetic peptide
  HER-2 / neu
YMIMVKCWMI

SEQ ID NO: 478 - protein, 9 aa, Artificial Sequence
  Description of Artificial Sequence: Synthetic peptide
  HER-2 / neu
HLYQGCQVV

SEQ ID NO: 479 - protein, 10 aa, Artificial Sequence
  Description of Artificial Sequence: Synthetic peptide
  HER-2 / neu
YLVPQQGFFC

SEQ ID NO: 480 - protein, 9 aa, Artificial Sequence
  Description of Artificial Sequence: Synthetic peptide
  HER-2 / neu
PLQPEQLQV

SEQ ID NO: 481 - protein, 9 aa, Artificial Sequence
  Description of Artificial Sequence: Synthetic peptide
  HER-2 / neu
TLEEITGYL

SEQ ID NO: 482 - protein, 9 aa, Artificial Sequence
  Description of Artificial Sequence: Synthetic peptide
  HER-2 / neu
ALIHHNTHL

SEQ ID NO: 483 - protein, 9 aa, Artificial Sequence
  Description of Artificial Sequence: Synthetic peptide
  HER-2 / neu
PLTSIISAV

SEQ ID NO: 484 - protein, 9 aa, Artificial Sequence
  Description of Artificial Sequence: Synthetic peptide
  HER-2 / neu
VLRENTSPK

SEQ ID NO: 485 - protein, 9 aa, Artificial Sequence
  Description of Artificial Sequence: Synthetic peptide
  HER-2 / neu
TYLPTNASL

SEQ ID NO: 486 - protein, 9 aa, Artificial Sequence
  Description of Artificial Sequence: Synthetic peptide
  HLA-DOB
FLLGLIFLL

SEQ ID NO: 487 - protein, 9 aa, Artificial Sequence
  Description of Artificial Sequence: Synthetic peptide
  Hepsin
SLLSGDWVL

SEQ ID NO: 488 - protein, 9 aa, Artificial Sequence
  Description of Artificial Sequence: Synthetic peptide
  Hepsin
GLQLGVQAV

SEQ ID NO: 489 - protein, 9 aa, Artificial Sequence
  Description of Artificial Sequence: Synthetic peptide
  Hepsin
PLTEYIQPV

SEQ ID NO: 490 - protein, 9 aa, Artificial Sequence
  Description of Artificial Sequence: Synthetic peptide
  IDO1
ALLEIASCL

SEQ ID NO: 491 - protein, 9 aa, Artificial Sequence
  Description of Artificial Sequence: Synthetic peptide
  IGF2B3
NLSSAEVVV

SEQ ID NO: 492 - protein, 9 aa, Artificial Sequence
  Description of Artificial Sequence: Synthetic peptide
  IGF2B3
RLLVPTQFV

SEQ ID NO: 493 - protein, 9 aa, Artificial Sequence
  Description of Artificial Sequence: Synthetic peptide
  IL13Ralpha2
WLPFGFILI

SEQ ID NO: 494 - protein, 9 aa, Artificial Sequence
  Description of Artificial Sequence: Synthetic peptide
  Intestinal carboxyl esterase
SPRWWPTCL

SEQ ID NO: 495 - protein, 9 aa, Artificial Sequence
  Description of Artificial Sequence: Synthetic peptide
  alpha-foetoprotein
GVALQTMKQ

SEQ ID NO: 496 - protein, 9 aa, Artificial Sequence
  Description of Artificial Sequence: Synthetic peptide
  alpha-foetoprotein
FMNKFIYEI

SEQ ID NO: 497 - protein, 10 aa, Artificial Sequence
  Description of Artificial Sequence: Synthetic peptide
  alpha-foetoprotein
QLAVSVILRV

SEQ ID NO: 498 - protein, 9 aa, Artificial Sequence
  Description of Artificial Sequence: Synthetic peptide
  Kallikrein 4
FLGYLILGV

SEQ ID NO: 499 - protein, 15 aa, Artificial Sequence
  Description of Artificial Sequence: Synthetic peptide
  Kallikrein 4
SVSESDTIRSISIAS

SEQ ID NO: 500 - protein, 15 aa, Artificial Sequence
  Description of Artificial Sequence: Synthetic peptide
  Kallikrein 4
LLANGRMPTVLQCVN

SEQ ID NO: 501 - protein, 15 aa, Artificial Sequence
  Description of Artificial Sequence: Synthetic peptide
  Kallikrein 4
RMPTVLQCVNVSVVS

SEQ ID NO: 502 - protein, 9 aa, Artificial Sequence
  Description of Artificial Sequence: Synthetic peptide
  KIF20A
LLSDDDVVV

SEQ ID NO: 503 - protein, 10 aa, Artificial Sequence
  Description of Artificial Sequence: Synthetic peptide
  KIF20A
AQPDTAPLPV

SEQ ID NO: 504 - protein, 9 aa, Artificial Sequence
  Description of Artificial Sequence: Synthetic peptide
  KIF20A
CIAEQYHTV

SEQ ID NO: 505 - protein, 10 aa, Artificial Sequence
  Description of Artificial Sequence: Synthetic peptide
  Lengsin
FLPEFGISSA

SEQ ID NO: 506 - protein, 14 aa, Artificial Sequence
  Description of Artificial Sequence: Synthetic peptide
  M-CSF
LPAVVGLSPGEQEY

SEQ ID NO: 507 - protein, 16 aa, Artificial Sequence
  Description of Artificial Sequence: Synthetic peptide
  MCSP
VGQDVSVLFRVTGALQ

SEQ ID NO: 508 - protein, 8 aa, Artificial Sequence
  Description of Artificial Sequence: Synthetic peptide
  mdm-2
VLFYLGQY

SEQ ID NO: 509 - protein, 9 aa, Artificial Sequence
  Description of Artificial Sequence: Synthetic peptide
  Meloe
TLNDECWPA

SEQ ID NO: 510 - protein, 14 aa, Artificial Sequence
  Description of Artificial Sequence: Synthetic peptide
  Meloe
ERISSTLNDECWPA

SEQ ID NO: 511 - protein, 11 aa, Artificial Sequence
  Description of Artificial Sequence: Synthetic peptide
  Meloe
FGRLQGISPKI

SEQ ID NO: 512 - protein, 13 aa, Artificial Sequence
  Description of Artificial Sequence: Synthetic peptide
  Meloe
TSREQFLPSEGAA

SEQ ID NO: 513 - protein, 14 aa, Artificial Sequence
  Description of Artificial Sequence: Synthetic peptide
  Meloe
CPPWHPSERISSTL

SEQ ID NO: 514 - protein, 9 aa, Artificial Sequence
  Description of Artificial Sequence: Synthetic peptide
  Midkine
ALLALTSAV

SEQ ID NO: 515 - protein, 9 aa, Artificial Sequence
  Description of Artificial Sequence: Synthetic peptide
  Midkine
AQCQETIRV

SEQ ID NO: 516 - protein, 15 aa, Artificial Sequence
  Description of Artificial Sequence: Synthetic peptide
  Midkine
LTLLALLALTSAVAK

SEQ ID NO: 517 - protein, 10 aa, Artificial Sequence
  Description of Artificial Sequence: Synthetic peptide
  MMP-2
GLPPDVQRVH

SEQ ID NO: 518 - protein, 12 aa, Artificial Sequence
  Description of Artificial Sequence: Synthetic peptide
  MMP-7
SLFPNSPKWTSK

SEQ ID NO: 519 - protein, 9 aa, Artificial Sequence
  Description of Artificial Sequence: Synthetic peptide
  MUC1
STAPPVHNV

SEQ ID NO: 520 - protein, 9 aa, Artificial Sequence
  Description of Artificial Sequence: Synthetic peptide
  MUC1
LLLLTVLTV

SEQ ID NO: 521 - protein, 12 aa, Artificial Sequence
  Description of Artificial Sequence: Synthetic peptide
  MUC1
PGSTAPPAHGVT

SEQ ID NO: 522 - protein, 9 aa, Artificial Sequence
  Description of Artificial Sequence: Synthetic peptide
  MUC5AC
TCQPTCRSL

SEQ ID NO: 523 - protein, 9 aa, Artificial Sequence
  Description of Artificial Sequence: Synthetic peptide
  p53
LLGRNSFEV

SEQ ID NO: 524 - protein, 9 aa, Artificial Sequence
  Description of Artificial Sequence: Synthetic peptide
  p53
RMPEAAPPV

SEQ ID NO: 525 - protein, 9 aa, Artificial Sequence
  Description of Artificial Sequence: Synthetic peptide
  p53
SQKTYQGSY

SEQ ID NO: 526 - protein, 13 aa, Artificial Sequence
  Description of Artificial Sequence: Synthetic peptide
  p53
PGTRVRAMAIYKQ

SEQ ID NO: 527 - protein, 12 aa, Artificial Sequence
  Description of Artificial Sequence: Synthetic peptide
  p53
HLIRVEGNLRVE

SEQ ID NO: 528 - protein, 9 aa, Artificial Sequence
  Description of Artificial Sequence: Synthetic peptide
  PAX5
TLPGYPPHV

SEQ ID NO: 529 - protein, 12 aa, Artificial Sequence
  Description of Artificial Sequence: Synthetic peptide
  PBF
CTACRWKKACQR

SEQ ID NO: 530 - protein, 9 aa, Artificial Sequence
  Description of Artificial Sequence: Synthetic peptide
  PRAME
VLDGLDVLL

SEQ ID NO: 531 - protein, 10 aa, Artificial Sequence
  Description of Artificial Sequence: Synthetic peptide
  PRAME
SLYSFPEPEA

SEQ ID NO: 532 - protein, 10 aa, Artificial Sequence
  Description of Artificial Sequence: Synthetic peptide
  PRAME
ALYVDSLFFL

SEQ ID NO: 533 - protein, 9 aa, Artificial Sequence
  Description of Artificial Sequence: Synthetic peptide
  PRAME
SLLQHLIGL

SEQ ID NO: 534 - protein, 10 aa, Artificial Sequence
  Description of Artificial Sequence: Synthetic peptide
  PRAME
LYVDSLFFLC

SEQ ID NO: 535 - protein, 9 aa, Artificial Sequence
  Description of Artificial Sequence: Synthetic peptide
  PSMA
NYARTEDFF

SEQ ID NO: 536 - protein, 9 aa, Artificial Sequence
  Description of Artificial Sequence: Synthetic peptide
  RAGE-1
LKLSGVVRL

SEQ ID NO: 537 - protein, 11 aa, Artificial Sequence
  Description of Artificial Sequence: Synthetic peptide
  RAGE-1
PLPPARNGGLG

SEQ ID NO: 538 - protein, 10 aa, Artificial Sequence
  Description of Artificial Sequence: Synthetic peptide
  RAGE-1
SPSSNRIRNT

SEQ ID NO: 539 - protein, 9 aa, Artificial Sequence
  Description of Artificial Sequence: Synthetic peptide
  RGS5
LAALPHSCL

SEQ ID NO: 540 - protein, 10 aa, Artificial Sequence
  Description of Artificial Sequence: Synthetic peptide
  RGS5
GLASFKSFLK

SEQ ID NO: 541 - protein, 10 aa, Artificial Sequence
  Description of Artificial Sequence: Synthetic peptide
  RhoC
RAGLQVRKNK

SEQ ID NO: 542 - protein, 10 aa, Artificial Sequence
  Description of Artificial Sequence: Synthetic peptide
  RNF43
  MOD_RES (10)..(10): Thr or absent
ALWPWLLMAX

SEQ ID NO: 543 - protein, 9 aa, Artificial Sequence
  Description of Artificial Sequence: Synthetic peptide
  RNF43
NSQPVWLCL

SEQ ID NO: 544 - protein, 9 aa, Artificial Sequence
  Description of Artificial Sequence: Synthetic peptide
  RU2AS
LPRWPPPQL

SEQ ID NO: 545 - protein, 9 aa, Artificial Sequence
  Description of Artificial Sequence: Synthetic peptide
  secernin1
KMDAEHPEL

SEQ ID NO: 546 - protein, 9 aa, Artificial Sequence
  Description of Artificial Sequence: Synthetic peptide
  SOX10
AWISKPPGV

SEQ ID NO: 547 - protein, 10 aa, Artificial Sequence
  Description of Artificial Sequence: Synthetic peptide
  SOX10
SAWISKPPGV

SEQ ID NO: 548 - protein, 9 aa, Artificial Sequence
  Description of Artificial Sequence: Synthetic peptide
  STEAP1
MIAVFLPIV

SEQ ID NO: 549 - protein, 15 aa, Artificial Sequence
  Description of Artificial Sequence: Synthetic peptide
  STEAP1
HQQYFYKIPILVINK

SEQ ID NO: 550 - protein, 10 aa, Artificial Sequence
  Description of Artificial Sequence: Synthetic peptide
  survivin
ELTLGEFLKL

SEQ ID NO: 551 - protein, 15 aa, Artificial Sequence
  Description of Artificial Sequence: Synthetic peptide
  survivin
TLGEFLKLDRERAKN

SEQ ID NO: 552 - protein, 10 aa, Artificial Sequence
  Description of Artificial Sequence: Synthetic peptide
  Telomerase
ILAKFLHWLE

SEQ ID NO: 553 - protein, 9 aa, Artificial Sequence
  Description of Artificial Sequence: Synthetic peptide
  Telomerase
RLVDDFLLV

SEQ ID NO: 554 - protein, 15 aa, Artificial Sequence
  Description of Artificial Sequence: Synthetic peptide
  Telomerase
RPGLLGASVLGLDDI

SEQ ID NO: 555 - protein, 15 aa, Artificial Sequence
  Description of Artificial Sequence: Synthetic peptide
  Telomerase
LTDLQPYMRQFVAHL

SEQ ID NO: 556 - protein, 9 aa, Artificial Sequence
  Description of Artificial Sequence: Synthetic peptide
  TPBG
RLARLALVL

SEQ ID NO: 557 - protein, 9 aa, Artificial Sequence
  Description of Artificial Sequence: Synthetic peptide
  VEGF
SRFGGAVVR

SEQ ID NO: 558 - protein, 11 aa, Artificial Sequence
  Description of Artificial Sequence: Synthetic peptide
  WT1
TSEKRPFMCAY

SEQ ID NO: 559 - protein, 9 aa, Artificial Sequence
  Description of Artificial Sequence: Synthetic peptide
  WT1
CMTWNQMNL

SEQ ID NO: 560 - protein, 11 aa, Artificial Sequence
  Description of Artificial Sequence: Synthetic peptide
  WT1
LSHLQMHSRKH

SEQ ID NO: 561 - protein, 16 aa, Artificial Sequence
  Description of Artificial Sequence: Synthetic peptide
  WT1
KRYFKLSHLQMHSRKH

SEQ ID NO: 562 - protein, 504 aa, Artificial Sequence
  Description of Artificial Sequence: Synthetic polypeptide
  single chain variable fragment fusion protein
DIQLTQSPASLAVSLGQRATISCKASQSVDYDGDSYLNWYQQIPGQPPKLLIYDASNLVSGIPPRFSGSGSGTDFTLNIHPVEKVDAATYHCQQSTEDPWTFGGGTKLEIKGGGGSGGGGSGGGGSQVQLQQSGAELVRPGSSVKISCKASGYAFSSYWMNWVKQRPGQGLEWIGQIWPGDGDTNYNGKFKGKATLTADESSSTAYMQLSSLASEDSAVYFCARRETTTVGRYYYAMDYWGQGTTVTVSSGGGGSDIKLQQSGAELARPGASVKMSCKTSGYTFTRYTMHWVKQRPGQGLEWIGYINPSRGYTNYNQKFKDKATLTTDKSSSTAYMQLSSLTSEDSAVYYCARYYDDHYCLDYWGQGTTLTVSSVEGGSGGSGGSGGSGGVDDIQLTQSPAIMSASPGEKVTMTCRASSSVSYMNWYQQKSGTSPKRWIYDTSKVASGVPYRFSGSGSGTSYSLTISSMEAEDAATYYCQQWSSNPLTFGAGTKLELKHHHHHH

SEQ ID NO: 563 - DNA, 290 bp, Artificial Sequence
  Description of Artificial Sequence: Synthetic polynucleotide
  FNR Responsive Promoter
gtcagcataacaccctgacctctcattaattgttcatgccgggcggcactatcgtcgtccggccttttcctctcttactctgctacgtacatctatttctataaatccgttcaatttgtctgttttttgcacaaacatgaaatatcagacaattccgtgacttaagaaaatttatacaaatcagcaatataccccttaaggagtatataaaggtgaatttgatttacatcaataagcggggttgctgaatcgttaaggtaggcggtaatagaaaagaaatcgaggcaaaa

SEQ ID NO: 564 - DNA, 173 bp, Artificial Sequence
  Description of Artificial Sequence: Synthetic polynucleotide
  FNR Responsive Promoter
atttcctctcatcccatccggggtgagagtcttttcccccgacttatggctcatgcatgcatcaaaaaagatgtgagcttgatcaaaaacaaaaaatatttcactcgacaggagtatttatattgcgcccgttacgtgggcttcgactgtaaatcagaaaggagaaaacacct

SEQ ID NO: 565 - DNA, 305 bp, Artificial Sequence
  Description of Artificial Sequence: Synthetic polynucleotide
  FNR Responsive Promoter
gtcagcataacaccctgacctctcattaattgttcatgccgggcggcactatcgtcgtccggccttttcctctcttactctgctacgtacatctatttctataaatccgttcaatttgtctgttttttgcacaaacatgaaatatcagacaattccgtgacttaagaaaatttatacaaatcagcaatataccccttaaggagtatataaaggtgaatttgatttacatcaataagcggggttgctgaatcgttaaggatccctctagaaataattttgtttaactttaagaaggagatatacat

SEQ ID NO: 566 - DNA, 180 bp, Artificial Sequence
  Description of Artificial Sequence: Synthetic polynucleotide
  FNR Responsive Promoter
catttcctctcatcccatccggggtgagagtcttttcccccgacttatggctcatgcatgcatcaaaaaagatgtgagcttgatcaaaaacaaaaaatatttcactcgacaggagtatttatattgcgcccggatccctctagaaataattttgtttaactttaagaaggagatatacat

SEQ ID NO: 567 - DNA, 199 bp, Artificial Sequence
  Description of Artificial Sequence: Synthetic polynucleotide
  FNR Responsive Promoter
agttgttcttattggtggtgttgctttatggttgcatcgtagtaaatggttgtaacaaaagcaatttttccggctgtctgtatacaaaaacgccgtaaagtttgagcgaagtcaataaactctctacccattcagggcaatatctctcttggatccctctagaaataattttgtttaactttaagaaggagatatacat

SEQ ID NO: 568 - DNA, 117 bp, Artificial Sequence
  Description of Artificial Sequence: Synthetic polynucleotide
  FNR-responsive regulatory region
atccccatcactcttgatggagatcaattccccaagctgctagagcgttaccttgcccttaaacattagcaatgtcgatttatcagagggccgacaggctcccacaggagaaaaccg

SEQ ID NO: 569 - DNA, 108 bp, Artificial Sequence
  Description of Artificial Sequence: Synthetic polynucleotide
  FNR-responsive regulatory region
ctcttgatcgttatcaattcccacgctgtttcagagcgttaccttgcccttaaacattagcaatgtcgatttatcagagggccgacaggctcccacaggagaaaaccg

SEQ ID NO: 570 - DNA, 290 bp, Artificial Sequence; identical to SEQ ID NO: 563
  Description of Artificial Sequence: Synthetic polynucleotide
  nirB1 , FNR-responsive regulatory region

SEQ ID NO: 571 - DNA, 433 bp, Artificial Sequence
  Description of Artificial Sequence: Synthetic polynucleotide
  nirB2 , FNR-responsive regulatory region
cggcccgatcgttgaacatagcggtccgcaggcggcactgcttacagcaaacggtctgtacgctgtcgtctttgtgatgtgcttcctgttaggtttcgtcagccgtcaccgtcagcataacaccctgacctctcattaattgctcatgccggacggcactatcgtcgtccggccttttcctctcttcccccgctacgtgcatctatttctataaacccgctcattttgtctattttttgcacaaacatgaaatatcagacaattccgtgacttaagaaaatttatacaaatcagcaatatacccattaaggagtatataaaggtgaatttgatttacatcaataagcggggttgctgaatcgttaaggtaggcggtaatagaaaagaaatcgaggcaaaaatgtttgtttaactttaagaaggagatatacat

SEQ ID NO: 572 - DNA, 290 bp, Artificial Sequence
  Description of Artificial Sequence: Synthetic polynucleotide
  nirB3 , FNR-responsive regulatory region
gtcagcataacaccctgacctctcattaattgctcatgccggacggcactatcgtcgtccggccttttcctctcttcccccgctacgtgcatctatttctataaacccgctcattttgtctattttttgcacaaacatgaaatatcagacaattccgtgacttaagaaaatttatacaaatcagcaatatacccattaaggagtatataaaggtgaatttgatttacatcaataagcggggttgctgaatcgttaaggtaggcggtaatagaaaagaaatcgaggcaaaa

SEQ ID NO: 573 - DNA, 173 bp, Artificial Sequence; identical to SEQ ID NO: 564
  Description of Artificial Sequence: Synthetic polynucleotide
  ydfZ , FNR-responsive regulatory region

SEQ ID NO: 574 - DNA, 305 bp, Artificial Sequence; identical to SEQ ID NO: 565
  Description of Artificial Sequence: Synthetic polynucleotide
  nirB+RBS , FNR-responsive regulatory region

SEQ ID NO: 575 - DNA, 180 bp, Artificial Sequence; identical to SEQ ID NO: 566
  Description of Artificial Sequence: Synthetic polynucleotide
  ydfZ+RBS , FNR-responsive regulatory region

SEQ ID NO: 576 - DNA, 199 bp, Artificial Sequence; identical to SEQ ID NO: 567
  Description of Artificial Sequence: Synthetic polynucleotide
  FNRS1 , FNR-responsive regulatory region

SEQ ID NO: 577 - DNA, 207 bp, Artificial Sequence
  Description of Artificial Sequence: Synthetic polynucleotide
  FNRS2 , FNR-responsive regulatory region
agttgttcttattggtggtgttgctttatggttgcatcgtagtaaatggttgtaacaaaagcaatttttccggctgtctgtatacaaaaacgccgcaaagtttgagcgaagtcaataaactctctacccattcagggcaatatctctcttggatccaaagtgaactctagaaataattttgtttaactttaagaaggagatatacat

SEQ ID NO: 578 - DNA, 390 bp, Artificial Sequence
  Description of Artificial Sequence: Synthetic polynucleotide
  nirB+crp , FNR-responsive regulatory region
tcgtctttgtgatgtgcttcctgttaggtttcgtcagccgtcaccgtcagcataacaccctgacctctcattaattgctcatgccggacggcactatcgtcgtccggccttttcctctcttcccccgctacgtgcatctatttctataaacccgctcattttgtctattttttgcacaaacatgaaatatcagacaattccgtgacttaagaaaatttatacaaatcagcaatatacccattaaggagtatataaaggtgaatttgatttacatcaataagcggggttgctgaatcgttaaggtagaaatgtgatctagttcacatttgcggtaatagaaaagaaatcgaggcaaaaatgtttgtttaactttaagaaggagatatacat

SEQ ID NO: 579 - DNA, 200 bp, Artificial Sequence
  Description of Artificial Sequence: Synthetic polynucleotide
  FNRS+crp , FNR-responsive regulatory region
agttgttcttattggtggtgttgctttatggttgcatcgtagtaaatggttgtaacaaaagcaatttttccggctgtctgtatacaaaaacgccgcaaagtttgagcgaagtcaataaactctctacccattcagggcaatatctctcaaatgtgatctagttcacattttttgtttaactttaagaaggagatatacat

SEQ ID NO: 580 - DNA, 355 bp, Artificial Sequence
  Description of Artificial Sequence: Synthetic polynucleotide
  katG, Regulatory sequence
tgtggcttttatgaaaatcacacagtgatcacaaattttaaacagagcacaaaatgctgcctcgaaatgagggcgggaaaataaggttatcagccttgttttctccctcattacttgaaggatatgaagctaaaacccttttttataaagcatttgtccgaattcggacataatcaaaaaagcttaattaagatcaatttgatctacatctctttaaccaacaatatgtaagatctcaactatcgcatccgtggattaattcaattataacttctctctaacgctgtgtatcgtaacggtaacactgtagaggggagcacattgatgcgaattcattaaagaggagaaaggtacc

SEQ ID NO: 581 - DNA, 228 bp, Artificial Sequence
  Description of Artificial Sequence: Synthetic polynucleotide
  Dps, Regulatory sequence
ttccgaaaattcctggcgagcagataaataagaattgttcttatcaatatatctaactcattgaatctttattagttttgtttttcacgcttgttaccactattagtgtgataggaacagccagaatagcggaacacatagccggtgctatacttaatctcgttaattactgggacataacatcaagaggatatgaaattcgaattcattaaagaggagaaaggtacc

SEQ ID NO: 582 - DNA, 334 bp, Artificial Sequence
  Description of Artificial Sequence: Synthetic polynucleotide
  ahpC, Regulatory sequence
gcttagatcaggtgattgccctttgtttatgagggtgttgtaatccatgtcgttgttgcatttgtaagggcaacacctcagcctgcaggcaggcactgaagataccaaagggtagttcagattacacggtcacctggaaagggggccattttactttttatcgccgctggcggtgcaaagttcacaaagttgtcttacgaaggttgtaaggtaaaacttatcgatttgataatggaaacgcattagccgaatcggcaaaaattggttaccttacatctcatcgaaaacacggaggaagtatagatgcgaattcattaaagaggagaaaggtacc

SEQ ID NO: 583 - DNA, 134 bp, Artificial Sequence
  Description of Artificial Sequence: Synthetic polynucleotide
  oxyS Regulatory sequence
ctcgagttcattatccatcctccatcgccacgatagttcatggcgataggtagaatagcaatgaacgattatccctatcaagcattctgactgataattgctcacacgaattcattaaagaggagaaaggtacc

SEQ ID NO: 584 - DNA, 1921 bp, Artificial Sequence
  Description of Artificial Sequence: Synthetic polynucleotide
  Prp (Propionate)
ttacccgtctggattttcagtacgcgcttttaaacgacgccacagcgtggtacggctgatccccaaataacgtgcggcggcgcgcttatcgccattaaagcgtgcgagcacctcctgcaatggaagcgcttctgctgacgagggcgtgatttctgctgtggtccccaccagttcaggtaataattgccgcataaattgtctgtccagtgttggtgcgggatcgacgcttaaaaaaagcgccaggcgttccatcatattccgcagttcgcgaatattaccgggccaatgatagttcagtagaagcggctgacactgcgtcagcccatgacgcaccgattcggtaaaagggatctccatcgcggccagcgattgttttaaaaagttttccgccagaggcagaatatcaggctgtcgctcgcgcaaggggggaagcggcagacgcagaatgctcaaacggtaaaacagatcggtacgaaaacgtccttgcgttatctcccgatccagatcgcaatgcgtggcgctgatcacccggacatctaccgggatcggctgatgcccgccaacgcgggtgacggctttttcctccagtacgcgtagaaggcgggtttgtaacggcagcggcatttcgccaatttcgtcaagaaacagcgtgccgccgtgggcgacctcaaacagccccgcacgtccacctcgtcttgagccggtaaacgctccctcctcatagccaaacagttcagcctccagcaacgactcggtaatcgcgccgcaattaacggcgacaaagggcggagaaggcttgttctgacggtggggctgacggttaaacaacgcctgatgaatcgcttgcgccgccagctctttcccggtccctgtttccccctgaatcagcactgccgcgcgggaacgggcatagagtgtaatcgtatggcgaacctgctccatttgtggtgaatcgccgaggatatcgctcagcgcataacgggtctgtaatcccttgctggaggtatgctggctatactgacgccgtgtcaggcgggtcatatccagcgcatcatggaaagcctgacgtacggtggccgctgaataaataaagatggcggtcattcctgcctcttccgccaggtcggtaattagtcctgccccaattacagcctcaatgccgttagctttgagctcgttaatttgcccgcgagcatcctcttcagtgatatagcttcgctgttcaagacggaggtgaaacgttttctgaaaggcgaccagagccggaatggtctcctgataggtcacgattcccattgaggaagtcagctttcccgcttttgccagagcctgtaatacatcgaatccgctgggtttgatgaggatgacaggtaccgacagtcggctttttaaataagcgccgttggaacctgccgcgataatcgcgtcgcagcgttcggttgccagttttttgcgaatgtaggctactgccttttcaaaaccgagctgaataggcgtgatcgtcgccagatgatcaaactccaggctgatatcccgaaatagttcgaacaggcgcgttaccgagaccgtccagatcaccggtttatcgctattatcgcgcgaagcgctatgcacagtaaccatcgtcgtagattcatgtttaaggaacgaattcttgttttatagatgtttcgttaatgttgcaatgaaacacaggcctccgtttcatgaaacgttagctgactcgtttttcttgtgactcgtctgtcagtattaaaaaagatttttcatttaactgattgtttttaaattgaattttatttaatggtttctcggtttttgggtctggcatatcccttgctttaatgagtgcatcttaattaacaattcaataacaagagggctgaatagtaatttcaacaaaataacgagcattcgaatg

SEQ ID NO: 585 - DNA, 305 bp, Artificial Sequence
  Description of Artificial Sequence: Synthetic polynucleotide
  Arabinose Promoter region
cagacattgccgtcactgcgtcttttactggctcttctcgctaacccaaccggtaaccccgcttattaaaagcattctgtaacaaagcgggaccaaagccatgacaaaaacgcgtaacaaaagtgtctataatcacggcagaaaagtccacattgattatttgcacggcgtcacactttgctatgccatagcatttttatccataagattagcggatccagcctgacgctttttttcgcaactctctactgtttctccatacctctagaaataattttgtttaactttaagaaggagatatacat

SEQ ID NO: 586 - DNA, 897 bp, Artificial Sequence
  Description of Artificial Sequence: Synthetic polynucleotide
  AraC (reverse orientation)
ttattcacaacctgccctaaactcgctcggactcgccccggtgcattttttaaatactcgcgagaaatagagttgatcgtcaaaaccgacattgcgaccgacggtggcgataggcatccgggtggtgctcaaaagcagcttcgcctgactgatgcgctggtcctcgcgccagcttaatacgctaatccctaactgctggcggaacaaatgcgacagacgcgacggcgacaggcagacatgctgtgcgacgctggcgatatcaaaattactgtctgccaggtgatcgctgatgtactgacaagcctcgcgtacccgattatccatcggtggatggagcgactcgttaatcgcttccatgcgccgcagtaacaattgctcaagcagatttatcgccagcaattccgaatagcgcccttccccttgtccggcattaatgatttgcccaaacaggtcgctgaaatgcggctggtgcgcttcatccgggcgaaagaaaccggtattggcaaatatcgacggccagttaagccattcatgccagtaggcgcgcggacgaaagtaaacccactggtgataccattcgtgagcctccggatgacgaccgtagtgatgaatctctccaggcgggaacagcaaaatatcacccggtcggcagacaaattctcgtccctgatttttcaccaccccctgaccgcgaatggtgagattgagaatataacctttcattcccagcggtcggtcgataaaaaaatcgagataaccgttggcctcaatcggcgttaaacccgccaccagatgggcgttaaacgagtatcccggcagcaggggatcattttgcgcttcagccatacttttcatactcccgccattcagagaagaaaccaattgtccatattgcat

SEQ ID NO: 587 - protein, 298 aa, Artificial Sequence
  Description of Artificial Sequence: Synthetic polypeptide
  AraC polypeptide
MQYGQLVSSLNGGSMKSMAEAQNDPLLPGYSFNAHLVAGLTPIEANGYLDFFIDRPLGMKGYILNLTIRGQGVVKNQGREFVCRPGDILLFPPGEIHHYGRHPEAHEWYHQWVYFRPRAYWHEWLNWPSIFANTGFFRPDEAHQPHFSDLFGQIINAGQGEGRYSELLAINLLEQLLLRRMEAINESLHPPMDNRVREACQYISDHLADSNFDIASVAQHVCLSPSRLSHLFRQQLGISVLSWREDQRISQAKLLLSTTRMPIATVGRNVGFDDQLYFSRVFKKCTGASPSEFRAGCE

SEQ ID NO: 588 - DNA, 280 bp, Artificial Sequence
  Description of Artificial Sequence: Synthetic polynucleotide
  Region comprising rhamnose inducible promoter
cggtgagcatcacatcaccacaattcagcaaattgtgaacatcatcacgttcatctttccctggttgccaatggcccattttcctgtcagtaacgagaaggtcgcgaatcaggcgctttttagactggtcgtaatgaaattcagctgtcaccggatgtgctttccggtctgatgagtccgtgaggacgaaacagcctctacaaataattttgtttaaaacaacacccactaagataactctagaaataattttgtttaactttaagaaggagatatacat

SEQ ID NO: 589 - DNA, 326 bp, Artificial Sequence
  Description of Artificial Sequence: Synthetic polynucleotide
  Lac Promoter region
attcaccaccctgaattgactctcttccgggcgctatcatgccataccgcgaaaggttttgcgccattcgatggcgcgccgcttcgtcaggccacatagctttcttgttctgatcggaacgatcgttggctgtgttgacaattaatcatcggctcgtataatgtgtggaattgtgagcgctcacaattagctgtcaccggatgtgctttccggtctgatgagtccgtgaggacgaaacagcctctacaaataattttgtttaaaacaacacccactaagataactctagaaataattttgtttaactttaagaaggagatatacat

SEQ ID NO: 590 - DNA, 1083 bp, Artificial Sequence
  Description of Artificial Sequence: Synthetic polynucleotide
  LacI (in reverse orientation)
tcactgcccgctttccagtcgggaaacctgtcgtgccagctgcattaatgaatcggccaacgcgcggggagaggcggtttgcgtattgggcgccagggtggtttttcttttcaccagtgagactggcaacagctgattgcccttcaccgcctggccctgagagagttgcagcaagcggtccacgctggtttgccccagcaggcgaaaatcctgtttgatggtggttaacggcgggatataacatgagctatcttcggtatcgtcgtatcccactaccgagatatccgcaccaacgcgcagcccggactcggtaatggcgcgcattgcgcccagcgccatctgatcgttggcaaccagcatcgcagtgggaacgatgccctcattcagcatttgcatggtttgttgaaaaccggacatggcactccagtcgccttcccgttccgctatcggctgaatttgattgcgagtgagatatttatgccagccagccagacgcagacgcgccgagacagaacttaatgggcccgctaacagcgcgatttgctggtgacccaatgcgaccagatgctccacgcccagtcgcgtaccgtcctcatgggagaaaataatactgttgatgggtgtctggtcagagacatcaagaaataacgccggaacattagtgcaggcagcttccacagcaatggcatcctggtcatccagcggatagttaatgatcagcccactgacgcgttgcgcgagaagattgtgcaccgccgctttacaggcttcgacgccgcttcgttctaccatcgacaccaccacgctggcacccagttgatcggcgcgagatttaatcgccgcgacaatttgcgacggcgcgtgcagggccagactggaggtggcaacgccaatcagcaacgactgtttgcccgccagttgttgtgccacgcggttgggaatgtaattcagctccgccatcgccgcttccactttttcccgcgttttcgcagaaacgtggctggcctggttcaccacgcgggaaacggtctgataagagacaccggcatactctgcgacatcgtataacgttactggtttcat

SEQ ID NO: 591 - protein, 360 aa, Artificial Sequence
  Description of Artificial Sequence: Synthetic polypeptide
  LacI polypeptide sequence
MKPVTLYDVAEYAGVSYQTVSRVVNQASHVSAKTREKVEAAMAELNYIPNRVAQQLAGKQSLLIGVATSSLALHAPSQIVAAIKSRADQLGASVVVSMVERSGVEACKAAVHNLLAQRVSGLIINYPLDDQDAIAVEAACTNVPALFLDVSDQTPINSIIFSHEDGTRLGVEHLVALGHQQIALLAGPLSSVSARLRLAGWHKYLTRNQIQPIAEREGDWSAMSGFQQTMQMLNEGIVPTAMLVANDQMALGAMRAITESGLRVGADISVVGYDDTEDSSCYIPPLTTIKQDFRLLGQTSVDRLLQLSQGQAVKGNQLLPVSLVKRKTTLAPNTQTASPRALADSLMQLARQVSRLESGQ

SEQ ID NO: 592 - DNA, 222 bp, Artificial Sequence
  Description of Artificial Sequence: Synthetic polynucleotide
  Region comprising Temperature sensitive promoter
acgttaaatctatcaccgcaagggataaatatctaacaccgtgcgtgttgactattttacctctggcggtgataatggttgcatagctgtcaccggatgtgctttccggtctgatgagtccgtgaggacgaaacagcctctacaaataattttgtttaaaacaacacccactaagataactctagaaataattttgtttaactttaagaaggagatatacat

SEQ ID NO: 593 - DNA, 714 bp, Artificial Sequence
  Description of Artificial Sequence: Synthetic polynucleotide
  mutant cI857 repressor
tcagccaaacgtctcttcaggccactgactagcgataactttccccacaacggaacaactctcattgcatgggatcattgggtactgtgggtttagtggttgtaaaaacacctgaccgctatccctgatcagtttcttgaaggtaaactcatcacccccaagtctggctatgcagaaatcacctggctcaacagcctgctcagggtcaacgagaattaacattccgtcaggaaagcttggcttggagcctgttggtgcggtcatggaattaccttcaacctcaagccagaatgcagaatcactggcttttttggttgtgcttacccatctctccgcatcacctttggtaaaggttctaagcttaggtgagaacatccctgcctgaacatgagaaaaaacagggtactcatactcacttctaagtgacggctgcatactaaccgcttcatacatctcgtagatttctctggcgattgaagggctaaattcttcaacgctaactttgagaatttttgtaagcaatgcggcgttataagcatttaatgcattgatgccattaaataaagcaccaacgcctgactgccccatccccatcttgtctgcgacagattcctgggataagccaagttcatttttctttttttcataaattgctttaaggcgacgtgcgtcctcaagctgctcttgtgttaatggtttcttttttgtgctcat

SEQ ID NO: 594 - DNA, 43 bp, Artificial Sequence
  Description of Artificial Sequence: Synthetic oligonucleotide
  RBS and leader region
ctctagaaataattttgtttaactttaagaaggagatatacat

SEQ ID NO: 595 - protein, 237 aa, Artificial Sequence
  Description of Artificial Sequence: Synthetic polypeptide
  mutant cI857 repressor polypeptide sequence
MSTKKKPLTQEQLEDARRLKAIYEKKKNELGLSQESVADKMGMGQSGVGALFNGINALNAYNAALLTKILKVSVEEFSPSIAREIYEMYEAVSMQPSLRSEYEYPVFSHVQAGMFSPKLRTFTKGDAERWVSTTKKASDSAFWLEVEGNSMTAPTGSKPSFPDGMLILVDPEQAVEPGDFCIARLGGDEFTFKKLIRDSGQVFLQPLNPQYPMIPCNESCSVVGKVIASQWPEETFG

SEQ ID NO: 596 - DNA, 748 bp, Artificial Sequence
  Description of Artificial Sequence: Synthetic polynucleotide
  TetR-Tet promoter construct
ttaagacccactttcacatttaagttgtttttctaatccgcatatgatcaattcaaggccgaataagaaggctggctctgcaccttggtgatcaaataattcgatagcttgtcgtaataatggcggcatactatcagtagtaggtgtttccctttcttctttagcgacttgatgctcttgatcttccaatacgcaacctaaagtaaaatgccccacagcgctgagtgcatataatgcattctctagtgaaaaaccttgttggcataaaaaggctaattgattttcgagagtttcatactgtttttctgtaggccgtgtacctaaatgtacttttgctccatcgcgatgacttagtaaagcacatctaaaacttttagcgttattacgtaaaaaatcttgccagctttccccttctaaagggcaaaagtgagtatggtgcctatctaacatctcaatggctaaggcgtcgagcaaagcccgcttattttttacatgccaatacaatgtaggctgctctacacctagcttctgggcgagtttacgggttgttaaaccttcgattccgacctcattaagcagctctaatgcgctgttaatcactttacttttatctaatctagacatcattaattcctaatttttgttgacactctatcattgatagagttattttaccactccctatcagtgatagagaaaagtgaactctagaaataattttgtttaactttaagaaggagatatacat

SEQ ID NO: 597 - DNA, 225 bp, Artificial Sequence
  Description of Artificial Sequence: Synthetic polynucleotide
  PssB promoter
tcacctttcccggattaaacgcttttttgcccggtggcatggtgctaccggcgatcacaaacggttaattatgacacaaattgacctgaatgaatatacagtattggaatgcattacccggagtgttgtgtaacaatgtctggccaggtttgtttcccggaaccgaggtcacaacatagtaaaagcgctattggtaatggtacaatcgcgcgtttacacttattc

SEQ ID NO: 598 - DNA, 30 bp, Artificial Sequence
  Description of Artificial Sequence: Synthetic oligonucleotide
  BBa_I14018
gtttatacataggcgagtactctgttatgg

SEQ ID NO: 599 - DNA, 30 bp, Artificial Sequence
  Description of Artificial Sequence: Synthetic oligonucleotide
  BBa_I14033
agaggttccaactttcaccataatgaaaca

SEQ ID NO: 600 - DNA, 30 bp, Artificial Sequence
  Description of Artificial Sequence: Synthetic oligonucleotide
  BBa_I14034
taaacaactaacggacaattctacctaaca

SEQ ID NO: 601 - DNA, 30 bp, Artificial Sequence
  Description of Artificial Sequence: Synthetic oligonucleotide
  BBa_I732021
acatcaagccaaattaaacaggattaacac

SEQ ID NO: 602 - DNA, 30 bp, Artificial Sequence
  Description of Artificial Sequence: Synthetic oligonucleotide
  BBa_I742126
gaggtaaaatagtcaacacgcacggtgtta

SEQ ID NO: 603 - DNA, 30 bp, Artificial Sequence
  Description of Artificial Sequence: Synthetic oligonucleotide
  BBa_J01006
caggccggaataactccctataatgcgcca

SEQ ID NO: 604 - DNA, 30 bp, Artificial Sequence
  Description of Artificial Sequence: Synthetic oligonucleotide
  BBa_J23100
ggctagctcagtcctaggtacagtgctagc

SEQ ID NO: 605 - DNA, 30 bp, Artificial Sequence
  Description of Artificial Sequence: Synthetic oligonucleotide
  BBa_J23101
agctagctcagtcctaggtattatgctagc

SEQ ID NO: 606 - DNA, 30 bp, Artificial Sequence
  Description of Artificial Sequence: Synthetic oligonucleotide
  BBa_J23102
agctagctcagtcctaggtactgtgctagc

SEQ ID NO: 607 - DNA, 30 bp, Artificial Sequence
  Description of Artificial Sequence: Synthetic oligonucleotide
  BBa_J23103
agctagctcagtcctagggattatgctagc

SEQ ID NO: 608 - DNA, 30 bp, Artificial Sequence
  Description of Artificial Sequence: Synthetic oligonucleotide
  BBa_J23104
agctagctcagtcctaggtattgtgctagc

SEQ ID NO: 609 - DNA, 30 bp, Artificial Sequence
  Description of Artificial Sequence: Synthetic oligonucleotide
  BBa_J23105
ggctagctcagtcctaggtactatgctagc

SEQ ID NO: 610 - DNA, 30 bp, Artificial Sequence
  Description of Artificial Sequence: Synthetic oligonucleotide
  BBa_J23106
ggctagctcagtcctaggtatagtgctagc

SEQ ID NO: 611 - DNA, 30 bp, Artificial Sequence
  Description of Artificial Sequence: Synthetic oligonucleotide
  BBa_J23107
ggctagctcagccctaggtattatgctagc

SEQ ID NO: 612 - DNA, 30 bp, Artificial Sequence
  Description of Artificial Sequence: Synthetic oligonucleotide
  BBa_J23108
agctagctcagtcctaggtataatgctagc

SEQ ID NO: 613 - DNA, 30 bp, Artificial Sequence
  Description of Artificial Sequence: Synthetic oligonucleotide
  BBa_J23109
agctagctcagtcctagggactgtgctagc

SEQ ID NO: 614 - DNA, 30 bp, Artificial Sequence
  Description of Artificial Sequence: Synthetic oligonucleotide
  BBa_J23110
ggctagctcagtcctaggtacaatgctagc

SEQ ID NO: 615 - DNA, 30 bp, Artificial Sequence; identical to SEQ ID NO: 610
  Description of Artificial Sequence: Synthetic oligonucleotide
  BBa_J23111

SEQ ID NO: 616 - DNA, 30 bp, Artificial Sequence; identical to SEQ ID NO: 607
  Description of Artificial Sequence: Synthetic oligonucleotide
  BBa_J23112

SEQ ID NO: 617 - DNA, 30 bp, Artificial Sequence
  Description of Artificial Sequence: Synthetic oligonucleotide
  BBa_J23113
ggctagctcagtcctagggattatgctagc

SEQ ID NO: 618 - DNA, 30 bp, Artificial Sequence; identical to SEQ ID NO: 614
  Description of Artificial Sequence: Synthetic oligonucleotide
  BBa_J23114

SEQ ID NO: 619 - DNA, 30 bp, Artificial Sequence
  Description of Artificial Sequence: Synthetic oligonucleotide
  BBa_J23115
agctagctcagcccttggtacaatgctagc

SEQ ID NO: 620 - DNA, 30 bp, Artificial Sequence
  Description of Artificial Sequence: Synthetic oligonucleotide
  BBa_J23116
agctagctcagtcctagggactatgctagc

SEQ ID NO: 621 - DNA, 30 bp, Artificial Sequence
  Description of Artificial Sequence: Synthetic oligonucleotide
  BBa_J23117
agctagctcagtcctagggattgtgctagc

SEQ ID NO: 622 - DNA, 30 bp, Artificial Sequence
  Description of Artificial Sequence: Synthetic oligonucleotide
  BBa_J23118
ggctagctcagtcctaggtattgtgctagc

SEQ ID NO: 623 - DNA, 30 bp, Artificial Sequence; identical to SEQ ID NO: 612
  Description of Artificial Sequence: Synthetic oligonucleotide
  BBa_J23119

SEQ ID NO: 624 - DNA, 30 bp, Artificial Sequence
  Description of Artificial Sequence: Synthetic oligonucleotide
  BBa_J23150
ggctagctcagtcctaggtattatgctagc

SEQ ID NO: 625 - DNA, 30 bp, Artificial Sequence; identical to SEQ ID NO: 614
  Description of Artificial Sequence: Synthetic oligonucleotide
  BBa_J23151

SEQ ID NO: 626 - DNA, 30 bp, Artificial Sequence
  Description of Artificial Sequence: Synthetic oligonucleotide
  BBa_J44002
aaagtgtgacgccgtgcaaataatcaatgt

SEQ ID NO: 627 - DNA, 30 bp, Artificial Sequence
  Description of Artificial Sequence: Synthetic oligonucleotide
  BBa_J48104
gacgaatacttaaaatcgtcatacttattt

SEQ ID NO: 628 - DNA, 30 bp, Artificial Sequence
  Description of Artificial Sequence: Synthetic oligonucleotide
  BBa_J54200
aaacctttcgcggtatggcatgatagcgcc

SEQ ID NO: 629 - DNA, 30 bp, Artificial Sequence
  Description of Artificial Sequence: Synthetic oligonucleotide
  BBa_J56015
tgatagcgcccggaagagagtcaattcagg

SEQ ID NO: 630 - DNA, 30 bp, Artificial Sequence
  Description of Artificial Sequence: Synthetic oligonucleotide
  BBa_J64951
ttatttaccgtgacgaactaattgctcgtg

SEQ ID NO: 631 - DNA, 30 bp, Artificial Sequence
  Description of Artificial Sequence: Synthetic oligonucleotide
  BBa_K088007
catacgccgttatacgttgtttacgctttg

SEQ ID NO: 632 - DNA, 30 bp, Artificial Sequence
  Description of Artificial Sequence: Synthetic oligonucleotide
  BBa_K119000
ttatgcttccggctcgtatgttgtgtggac

SEQ ID NO: 633 - DNA, 30 bp, Artificial Sequence
  Description of Artificial Sequence: Synthetic oligonucleotide
  BBa_K119001
ttatgcttccggctcgtatggtgtgtggac

SEQ ID NO: 634 - DNA, 30 bp, Artificial Sequence; identical to SEQ ID NO: 609
  Description of Artificial Sequence: Synthetic oligonucleotide
  BBa_K1330002

SEQ ID NO: 635 - DNA, 30 bp, Artificial Sequence
  Description of Artificial Sequence: Synthetic oligonucleotide
  BBa_K137029
atatatatatatatataatggaagcgtttt

SEQ ID NO: 636 - DNA, 30 bp, Artificial Sequence; identical to SEQ ID NO: 635
  Description of Artificial Sequence: Synthetic oligonucleotide
  BBa_K137030

SEQ ID NO: 637 - DNA, 30 bp, Artificial Sequence
  Description of Artificial Sequence: Synthetic oligonucleotide
  BBa_K137031
ccccgaaagcttaagaatataattgtaagc

SEQ ID NO: 638 - DNA, 30 bp, Artificial Sequence; identical to SEQ ID NO: 637
  Description of Artificial Sequence: Synthetic oligonucleotide
  BBa_K137032

SEQ ID NO: 639 - DNA, 30 bp, Artificial Sequence
  Description of Artificial Sequence: Synthetic oligonucleotide
  BBa_K137085
tgacaatatatatatatatataatgctagc

SEQ ID NO: 640 - DNA, 30 bp, Artificial Sequence
  Description of Artificial Sequence: Synthetic oligonucleotide
  BBa_K137086
acaatatatatatatatatataatgctagc

SEQ ID NO: 641 - DNA, 30 bp, Artificial Sequence
  Description of Artificial Sequence: Synthetic oligonucleotide
  BBa_K137087
aatatatatatatatatatataatgctagc

SEQ ID NO: 642 - DNA, 30 bp, Artificial Sequence
  Description of Artificial Sequence: Synthetic oligonucleotide
  BBa_K137088
tatatatatatatatatatataatgctagc

SEQ ID NO: 643 - DNA, 30 bp, Artificial Sequence; identical to SEQ ID NO: 642
  Description of Artificial Sequence: Synthetic oligonucleotide
  BBa_K137089

SEQ ID NO: 644 - DNA, 30 bp, Artificial Sequence
  Description of Artificial Sequence: Synthetic oligonucleotide
  BBa_K137090
aaaaaaaaaaaaaaaaaatataatgctagc

SEQ ID NO: 645 - DNA, 30 bp, Artificial Sequence; identical to SEQ ID NO: 644
  Description of Artificial Sequence: Synthetic oligonucleotide
  BBa_K137091

SEQ ID NO: 646 - DNA, 30 bp, Artificial Sequence
  Description of Artificial Sequence: Synthetic oligonucleotide
  BBa_K1585100
ggaattgtgagcggataacaatttcacaca

SEQ ID NO: 647 - DNA, 30 bp, Artificial Sequence; identical to SEQ ID NO: 646
  Description of Artificial Sequence: Synthetic oligonucleotide
  BBa_K1585101

SEQ ID NO: 648 - DNA, 30 bp, Artificial Sequence; identical to SEQ ID NO: 646
  Description of Artificial Sequence: Synthetic oligonucleotide
  BBa_K1585102

SEQ ID NO: 649 - DNA, 30 bp, Artificial Sequence; identical to SEQ ID NO: 646
  Description of Artificial Sequence: Synthetic oligonucleotide
  BBa_K1585103

SEQ ID NO: 650 - DNA, 30 bp, Artificial Sequence; identical to SEQ ID NO: 646
  Description of Artificial Sequence: Synthetic oligonucleotide
  BBa_K1585104

SEQ ID NO: 651 - DNA, 30 bp, Artificial Sequence; identical to SEQ ID NO: 646
  Description of Artificial Sequence: Synthetic oligonucleotide
  BBa_K1585105

SEQ ID NO: 652 - DNA, 30 bp, Artificial Sequence; identical to SEQ ID NO: 646
  Description of Artificial Sequence: Synthetic oligonucleotide
  BBa_K1585106

SEQ ID NO: 653 - DNA, 30 bp, Artificial Sequence; identical to SEQ ID NO: 646
  Description of Artificial Sequence: Synthetic oligonucleotide
  BBa_K1585110

SEQ ID NO: 654 - DNA, 30 bp, Artificial Sequence; identical to SEQ ID NO: 646
  Description of Artificial Sequence: Synthetic oligonucleotide
  BBa_K1585113

SEQ ID NO: 655 - DNA, 30 bp, Artificial Sequence; identical to SEQ ID NO: 646
  Description of Artificial Sequence: Synthetic oligonucleotide
  BBa_K1585115

SEQ ID NO: 656 - DNA, 30 bp, Artificial Sequence; identical to SEQ ID NO: 646
  Description of Artificial Sequence: Synthetic oligonucleotide
  BBa_K1585116

SEQ ID NO: 657 - DNA, 30 bp, Artificial Sequence; identical to SEQ ID NO: 646
  Description of Artificial Sequence: Synthetic oligonucleotide
  BBa_K1585117

SEQ ID NO: 658 - DNA, 30 bp, Artificial Sequence; identical to SEQ ID NO: 646
  Description of Artificial Sequence: Synthetic oligonucleotide
  BBa_K1585118

SEQ ID NO: 659 - DNA, 30 bp, Artificial Sequence; identical to SEQ ID NO: 646
  Description of Artificial Sequence: Synthetic oligonucleotide
  BBa_K1585119

SEQ ID NO: 660 - DNA, 30 bp, Artificial Sequence
  Description of Artificial Sequence: Synthetic oligonucleotide
  BBa_K1824896
gattaaagaggagaaatactagagtactag

SEQ ID NO: 661 - DNA, 30 bp, Artificial Sequence
  Description of Artificial Sequence: Synthetic oligonucleotide
  BBa_K256002
caccttcgggtgggcctttctgcgtttata

SEQ ID NO: 662 - DNA, 30 bp, Artificial Sequence; identical to SEQ ID NO: 661
  Description of Artificial Sequence: Synthetic oligonucleotide
  BBa_K256018

SEQ ID NO: 663 - DNA, 30 bp, Artificial Sequence; identical to SEQ ID NO: 661
  Description of Artificial Sequence: Synthetic oligonucleotide
  BBa_K256020

SEQ ID NO: 664 - DNA, 30 bp, Artificial Sequence; identical to SEQ ID NO: 661
  Description of Artificial Sequence: Synthetic oligonucleotide
  BBa_K256033

SEQ ID NO: 665 - DNA, 30 bp, Artificial Sequence; identical to SEQ ID NO: 604
  Description of Artificial Sequence: Synthetic oligonucleotide
  BBa_K292000

SEQ ID NO: 666 - DNA, 30 bp, Artificial Sequence
  Description of Artificial Sequence: Synthetic oligonucleotide
  BBa_K292001
tgctagctactagagattaaagaggagaaa

SEQ ID NO: 667 - DNA, 30 bp, Artificial Sequence
  Description of Artificial Sequence: Synthetic oligonucleotide
  BBa_K418000
ttgtgagcggataacaagatactgagcaca

SEQ ID NO: 668 - DNA, 30 bp, Artificial Sequence; identical to SEQ ID NO: 667
  Description of Artificial Sequence: Synthetic oligonucleotide
  BBa_K418002

SEQ ID NO: 669 - DNA, 30 bp, Artificial Sequence; identical to SEQ ID NO: 667
  Description of Artificial Sequence: Synthetic oligonucleotide
  BBa_K418003

SEQ ID NO: 670 - DNA, 30 bp, Artificial Sequence; identical to SEQ ID NO: 604
  Description of Artificial Sequence: Synthetic oligonucleotide
  BBa_K823004

SEQ ID NO: 671 - DNA, 30 bp, Artificial Sequence; identical to SEQ ID NO: 605
  Description of Artificial Sequence: Synthetic oligonucleotide
  BBa_K823005

SEQ ID NO: 672 - DNA, 30 bp, Artificial Sequence; identical to SEQ ID NO: 606
  Description of Artificial Sequence: Synthetic oligonucleotide
  BBa_K823006

SEQ ID NO: 673 - DNA, 30 bp, Artificial Sequence; identical to SEQ ID NO: 607
  Description of Artificial Sequence: Synthetic oligonucleotide
  BBa_K823007

SEQ ID NO: 674 - DNA, 30 bp, Artificial Sequence; identical to SEQ ID NO: 610
  Description of Artificial Sequence: Synthetic oligonucleotide
  BBa_K823008

SEQ ID NO: 675 - DNA, 30 bp, Artificial Sequence; identical to SEQ ID NO: 617
  Description of Artificial Sequence: Synthetic oligonucleotide
  BBa_K823010

SEQ ID NO: 676 - DNA, 30 bp, Artificial Sequence; identical to SEQ ID NO: 614
  Description of Artificial Sequence: Synthetic oligonucleotide
  BBa_K823011

SEQ ID NO: 677 - DNA, 30 bp, Artificial Sequence; identical to SEQ ID NO: 621
  Description of Artificial Sequence: Synthetic oligonucleotide
  BBa_K823013

SEQ ID NO: 678 - DNA, 30 bp, Artificial Sequence; identical to SEQ ID NO: 622
  Description of Artificial Sequence: Synthetic oligonucleotide
  BBa_K823014

SEQ ID NO: 679 - DNA, 30 bp, Artificial Sequence
  Description of Artificial Sequence: Synthetic oligonucleotide
  BBa_M13101
cctgtttttatgttattctctctgtaaagg

SEQ ID NO: 680 - DNA, 30 bp, Artificial Sequence
  Description of Artificial Sequence: Synthetic oligonucleotide
  BBa_M13102
aaatatttgcttatacaatcttcctgtttt

SEQ ID NO: 681 - DNA, 30 bp, Artificial Sequence
  Description of Artificial Sequence: Synthetic oligonucleotide
  BBa_M13103
gctgataaaccgatacaattaaaggctcct

SEQ ID NO: 682 - DNA, 30 bp, Artificial Sequence
  Description of Artificial Sequence: Synthetic oligonucleotide
  BBa_M13104
ctcttctcagcgtcttaatctaagctatcg

SEQ ID NO: 683 - DNA, 30 bp, Artificial Sequence
  Description of Artificial Sequence: Synthetic oligonucleotide
  BBa_M13105
atgagccagttcttaaaatcgcataaggta

SEQ ID NO: 684 - DNA, 30 bp, Artificial Sequence
  Description of Artificial Sequence: Synthetic oligonucleotide
  BBa_M13106
ctattgattgtgacaaaataaacttattcc

SEQ ID NO: 685 - DNA, 30 bp, Artificial Sequence
  Description of Artificial Sequence: Synthetic oligonucleotide
  BBa_M13108
gtttcgcgcttggtataatcgctgggggtc

SEQ ID NO: 686 - DNA, 30 bp, Artificial Sequence
  Description of Artificial Sequence: Synthetic oligonucleotide
  BBa_M13110
ctttgcttctgactataatagtcagggtaa

SEQ ID NO: 687 - DNA, 30 bp, Artificial Sequence
  Description of Artificial Sequence: Synthetic oligonucleotide
  BBa_M31519
aaaccgatacaattaaaggctcctgctagc

SEQ ID NO: 688 - DNA, 30 bp, Artificial Sequence
  Description of Artificial Sequence: Synthetic oligonucleotide
  BBa_R1074
caccacactgatagtgctagtgtagatcac

SEQ ID NO: 689 - DNA, 30 bp, Artificial Sequence
  Description of Artificial Sequence: Synthetic oligonucleotide
  BBa_R1075
gccggaataactccctataatgcgccacca

SEQ ID NO: 690 - DNA, 30 bp, Artificial Sequence
  Description of Artificial Sequence: Synthetic oligonucleotide
  BBa_S03331
ttgacaagcttttcctcagctccgtaaact

SEQ ID NO: 691 - DNA, 30 bp, Artificial Sequence
  Description of Artificial Sequence: Synthetic oligonucleotide
  BBa_J45992
ggtttcaaaattgtgatctatatttaacaa

SEQ ID NO: 692 - DNA, 30 bp, Artificial Sequence; identical to SEQ ID NO: 691
  Description of Artificial Sequence: Synthetic oligonucleotide
  BBa_J45993

SEQ ID NO: 693 - DNA, 30 bp, Artificial Sequence
  Description of Artificial Sequence: Synthetic oligonucleotide
  BBa_J45504
tctattccaataaagaaatcttcctgcgtg

SEQ ID NO: 694 - DNA, 30 bp, Artificial Sequence
  Description of Artificial Sequence: Synthetic oligonucleotide
  BBa_K1895002
gaccgaatatatagtggaaacgtttagatg

SEQ ID NO: 695 - DNA, 30 bp, Artificial Sequence
  Description of Artificial Sequence: Synthetic oligonucleotide
  BBa_K1895003
ccacatcctgtttttaaccttaaaatggca

SEQ ID NO: 696 - DNA, 30 bp, Artificial Sequence
  Description of Artificial Sequence: Synthetic oligonucleotide
  BBa_K143012
aaaaatgggctcgtgttgtacaataaatgt

SEQ ID NO: 697 - DNA, 30 bp, Artificial Sequence
  Description of Artificial Sequence: Synthetic oligonucleotide
  BBa_K143013
aaaaaaagcgcgcgattatgtaaaatataa

SEQ ID NO: 698 - DNA, 30 bp, Artificial Sequence
  Description of Artificial Sequence: Synthetic oligonucleotide
  BBa_K780003
aattgcagtaggcatgacaaaatggactca

SEQ ID NO: 699 - DNA, 30 bp, Artificial Sequence
  Description of Artificial Sequence: Synthetic oligonucleotide
  BBa_K823000
caagcttttcctttataatagaatgaatga

SEQ ID NO: 700 - DNA, 30 bp, Artificial Sequence
  Description of Artificial Sequence: Synthetic oligonucleotide
  BBa_K823002
tctaagctagtgtattttgcgtttaatagt

SEQ ID NO: 701 - DNA, 30 bp, Artificial Sequence
  Description of Artificial Sequence: Synthetic oligonucleotide
  BBa_K823003
aatgggctcgtgttgtacaataaatgtagt

SEQ ID NO: 702 - DNA, 30 bp, Artificial Sequence
  Description of Artificial Sequence: Synthetic oligonucleotide
  BBa_K143010
atccttatcgttatgggtattgtttgtaat

SEQ ID NO: 703 - DNA, 30 bp, Artificial Sequence
  Description of Artificial Sequence: Synthetic oligonucleotide
  BBa_K143011
taaaagaattgtgagcgggaatacaacaac

SEQ ID NO: 704 - DNA, 30 bp, Artificial Sequence; identical to SEQ ID NO: 697
  Description of Artificial Sequence: Synthetic oligonucleotide
  BBa_K143013

SEQ ID NO: 705 - DNA, 30 bp, Artificial Sequence
  Description of Artificial Sequence: Synthetic oligonucleotide
  BBa_K112706
tacaaaataattcccctgcaaacattatca

SEQ ID NO: 706 - DNA, 30 bp, Artificial Sequence
  Description of Artificial Sequence: Synthetic oligonucleotide
  BBa_K112707
tacaaaataattcccctgcaaacattatcg

SEQ ID NO: 707 - DNA, 30 bp, Artificial Sequence
  Description of Artificial Sequence: Synthetic oligonucleotide
  BBa_I712074
agggaatacaagctacttgttctttttgca

SEQ ID NO: 708 - DNA, 23 bp, Artificial Sequence
  Description of Artificial Sequence: Synthetic oligonucleotide
  BBa_I719005
taatacgactcactatagggaga

SEQ ID NO: 709 - DNA, 28 bp, Artificial Sequence
  Description of Artificial Sequence: Synthetic oligonucleotide
  BBa_J34814
gaatttaatacgactcactatagggaga

SEQ ID NO: 710 - DNA, 19 bp, Artificial Sequence
  Description of Artificial Sequence: Synthetic oligonucleotide
  BBa_J64997
taatacgactcactatagg

SEQ ID NO: 711 - DNA, 30 bp, Artificial Sequence
  Description of Artificial Sequence: Synthetic oligonucleotide
  BBa_K113010
gagtcgtattaatacgactcactatagggg

SEQ ID NO: 712 - DNA, 30 bp, Artificial Sequence
  Description of Artificial Sequence: Synthetic oligonucleotide
  BBa_K113011
agtgagtcgtactacgactcactatagggg

SEQ ID NO: 713 - DNA, 30 bp, Artificial Sequence
  Description of Artificial Sequence: Synthetic oligonucleotide
  BBa_K113012
gagtcgtattaatacgactctctatagggg

SEQ ID NO: 714 - DNA, 18 bp, Artificial Sequence
  Description of Artificial Sequence: Synthetic oligonucleotide
  BBa_K1614000
taatacgactcactatag

SEQ ID NO: 715 - DNA, 23 bp, Artificial Sequence
  Description of Artificial Sequence: Synthetic oligonucleotide
  BBa_R0085
taatacgactcactatagggaga

SEQ ID NO: 716 - DNA, 23 bp, Artificial Sequence
  Description of Artificial Sequence: Synthetic oligonucleotide
  BBa_R0180
ttatacgactcactatagggaga

SEQ ID NO: 717 - DNA, 23 bp, Artificial Sequence
  Description of Artificial Sequence: Synthetic oligonucleotide
  BBa_R0181
gaatacgactcactatagggaga

SEQ ID NO: 718 - DNA, 23 bp, Artificial Sequence
  Description of Artificial Sequence: Synthetic oligonucleotide
  BBa_R0182
taatacgtctcactatagggaga

SEQ ID NO: 719 - DNA, 23 bp, Artificial Sequence
  Description of Artificial Sequence: Synthetic oligonucleotide
  BBa_R0183
tcatacgactcactatagggaga

SEQ ID NO: 720 - DNA, 30 bp, Artificial Sequence
  Description of Artificial Sequence: Synthetic oligonucleotide
  BBa_Z0251
taatacgactcactatagggagaccacaac

SEQ ID NO: 721 - DNA, 30 bp, Artificial Sequence
  Description of Artificial Sequence: Synthetic oligonucleotide
  BBa_Z0252
taattgaactcactaaagggagaccacagc

SEQ ID NO: 722 - DNA, 30 bp, Artificial Sequence
  Description of Artificial Sequence: Synthetic oligonucleotide
  BBa_Z0253
cgaagtaatacgactcactattagggaaga

SEQ ID NO: 723 - DNA, 19 bp, Artificial Sequence
  Description of Artificial Sequence: Synthetic oligonucleotide
atttaggtgacactataga

SEQ ID NO: 724 - DNA, 30 bp, Artificial Sequence
  Description of Artificial Sequence: Synthetic oligonucleotide
  BBa_I766555
acaaacacaaatacacacactaaattaata

SEQ ID NO: 725 - DNA, 30 bp, Artificial Sequence
  Description of Artificial Sequence: Synthetic oligonucleotide
  BBa_I766556
ccaagcatacaatcaactatctcatataca

SEQ ID NO: 726 - DNA, 30 bp, Artificial Sequence
  Description of Artificial Sequence: Synthetic oligonucleotide
  BBa_I766557
gatacaggatacagcggaaacaacttttaa

SEQ ID NO: 727 - DNA, 30 bp, Artificial Sequence
  Description of Artificial Sequence: Synthetic oligonucleotide
  BBa_J63005
tttcaagctataccaagcatacaatcaact

SEQ ID NO: 728 - DNA, 30 bp, Artificial Sequence
  Description of Artificial Sequence: Synthetic oligonucleotide
  BBa_K105027
cctttgcagcataaattactatacttctat

SEQ ID NO: 729 - DNA, 30 bp, Artificial Sequence; identical to SEQ ID NO: 728
  Description of Artificial Sequence: Synthetic oligonucleotide
  BBa_K105028

SEQ ID NO: 730 - DNA, 30 bp, Artificial Sequence; identical to SEQ ID NO: 728
  Description of Artificial Sequence: Synthetic oligonucleotide
  BBa_K105029

SEQ ID NO: 731 - DNA, 30 bp, Artificial Sequence; identical to SEQ ID NO: 728
  Description of Artificial Sequence: Synthetic oligonucleotide
  BBa_K105030

SEQ ID NO: 732 - DNA, 30 bp, Artificial Sequence; identical to SEQ ID NO: 728
  Description of Artificial Sequence: Synthetic oligonucleotide
  BBa_K105031

SEQ ID NO: 733 - DNA, 30 bp, Artificial Sequence
  Description of Artificial Sequence: Synthetic oligonucleotide
  BBa_K122000
ttatctactttttacaacaaatataaaaca

SEQ ID NO: 734 - DNA, 30 bp, Artificial Sequence; identical to SEQ ID NO: 724
  Description of Artificial Sequence: Synthetic oligonucleotide
  BBa_K124000

SEQ ID NO: 735 - DNA, 30 bp, Artificial Sequence
  Description of Artificial Sequence: Synthetic oligonucleotide
  BBa_K124002
gtttcgaataaacacacataaacaaacaaa

SEQ ID NO: 736 - DNA, 30 bp, Artificial Sequence; identical to SEQ ID NO: 725
  Description of Artificial Sequence: Synthetic oligonucleotide
  BBa_K319005

SEQ ID NO: 737 - DNA, 30 bp, Artificial Sequence
  Description of Artificial Sequence: Synthetic oligonucleotide
  BBa_M31201
accatcaaaggaagctttaatcttctcata

SEQ ID NO: 738 - DNA, 30 bp, Artificial Sequence
  Description of Artificial Sequence: Synthetic oligonucleotide
  BBa_I712004
agaacccactgcttactggcttatcgaaat

SEQ ID NO: 739 - DNA, 30 bp, Artificial Sequence
  Description of Artificial Sequence: Synthetic oligonucleotide
  BBa_K076017
ggccgtttttggcttttttgttagacgaag

SEQ ID NO: 740 - DNA, 66 bp, Artificial Sequence
  Description of Artificial Sequence: Synthetic oligonucleotide
  Plpp
ataagtgccttcccatcaaaaaaatattctcaacataaaaaactttgtgtaatacttgtaacgcta

SEQ ID NO: 741 - DNA, 52 bp, Artificial Sequence
  Description of Artificial Sequence: Synthetic oligonucleotide
  PapFAB46
aaaaagagtattgacttcgcatctttttgtacctataatagattcattgcta

SEQ ID NO: 742 - DNA, 59 bp, Artificial Sequence
  Description of Artificial Sequence: Synthetic oligonucleotide
  PJ23101+UP element
ggaaaatttttttaaaaaaaaaactttacagctagctcagtcctaggtattatgctagc

SEQ ID NO: 743 - DNA, 59 bp, Artificial Sequence
  Description of Artificial Sequence: Synthetic oligonucleotide
  PJ23107+UP element
ggaaaatttttttaaaaaaaaaactttacggctagctcagccctaggtattatgctagc

SEQ ID NO: 744 - DNA, 64 bp, Artificial Sequence
  Description of Artificial Sequence: Synthetic oligonucleotide
  PSYN23119
ggaaaatttttttaaaaaaaaaacttgacagctagctcagtccttggtataatgctagcacgaa

SEQ ID NO: 745 - protein, 21 aa, Artificial Sequence
  Description of Artificial Sequence: Synthetic peptide
  PhoA
MKQSTIALALLPLLFTPVTKA

SEQ ID NO: 746 - protein, 20 aa, Artificial Sequence
  Description of Artificial Sequence: Synthetic peptide
  PhoA
KQSTIALALLPLLFTPVTKA

SEQ ID NO: 747 - protein, 22 aa, Artificial Sequence
  Description of Artificial Sequence: Synthetic peptide
  OmpF
MMKRNILAVIVPALLVAGTANA

SEQ ID NO: 748 - protein, 15 aa, Artificial Sequence
  Description of Artificial Sequence: Synthetic peptide
  cvaC
MRTLTLNELDSVSGG

SEQ ID NO: 749 - protein, 43 aa, Artificial Sequence
  Description of Artificial Sequence: Synthetic polypeptide
  TorA
MNNNDLFQASRRRFLAQLGGLTVAGMLGTSLLTPRRATAAQAA

SEQ ID NO: 750 - protein, 33 aa, Artificial Sequence
  Description of Artificial Sequence: Synthetic polypeptide
  fdnG
MDVSRRQFFKICAGGMAGTTVAALGFAPKQALA

SEQ ID NO: 751 - protein, 45 aa, Artificial Sequence
  Description of Artificial Sequence: Synthetic polypeptide
  dmsA
MKTKIPDAVLAAEVSRRGLVKTTAIGGLAMASSALTLPFSRIAHA

SEQ ID NO: 752 - protein, 21 aa, Artificial Sequence
  Description of Artificial Sequence: Synthetic peptide
  PelB
KYLLPTAAAGLLLLAAQPAMA

SEQ ID NO: 753 - protein, 52 aa, Artificial Sequence
  Description of Artificial Sequence: Synthetic polypeptide
  HlyA secretion signal
LNPLINEISKIISAAGNFDVKEERAAASLLQLSGNASDFSYGRNSITLTASA

SEQ ID NO: 754 - DNA, 159 bp, Artificial Sequence
  Description of Artificial Sequence: Synthetic polynucleotide
  HlyA secretion signal
cttaatccattaattaatgaaatcagcaaaatcatttcagctgcaggtaattttgatgttaaagaggaaagagctgcagcttctttattgcagttgtccggtaatgccagtgatttttcatatggacggaactcaataactttgacagcatcagcataa

SEQ ID NO: 755 - DNA, 355 bp, Artificial Sequence
  Description of Artificial Sequence: Synthetic polynucleotide
  VH (10D1)
caggtgcagctggtggagtctgggggaggcgtggtccagcctgggaggtccctgagactctcctgtgcagcctctggattcaccttcagtagctatactatgcactgggtccgccaggctccaggcaaggggctggagtgggtgacatttatatcatatgatggaaacaataaatactacgcagactccgtgaagggccgattcaccatctccagagacaattccaagaacacgctgtatctgcaaatgaacagcctgagagctgaggacacggctatatattactgtgcgaggaccggctggctggggccctttgactactggggccagggaaccctggtcaccgtctcctcag

SEQ ID NO: 756 - DNA, 325 bp, Artificial Sequence
  Description of Artificial Sequence: Synthetic polynucleotide
  VL (10D1)
gaaattgtgttgacgcagtctccaggcaccctgtctttgtctccaggggaaagagccaccctctcctgcagggccagtcagagtgttggcagcagctacttagcctggtaccagcagaaacctggccaggctcccaggctcctcatctatggtgcattcagcagggccactggcatcccagacaggttcagtggcagtgggtctgggacagacttcactctcaccatcagcagactggagcctgaagattttgcagtgtattactgtcagcagtatggtagctcaccgtggacgttcggccaagggaccaaggtggaaatcaaac

SEQ ID NO: 757 - DNA, 355 bp, Artificial Sequence
  Description of Artificial Sequence: Synthetic polynucleotide
  VH (4B6)
caggtgcagctggtggagtctgggggaggcgtggtccagcctgggaggtccctgagactctcctgtgcagcctctggattcaccttcagtagctatactatgcactgggtccgccaggctccaggcaaggggctggagtgggtgacatttatatcatatgatggaagcaataaacactacgcagactccgtgaagggccgattcaccgtctccagagacaattccaagaacacgctgtatctgcaaatgaacagcctgagagctgaggacacggctatatattactgtgcgaggaccggctggctggggccctttgactactggggccagggaaccctggtcaccgtctcctcag

SEQ ID NO: 758 - DNA, 325 bp, Artificial Sequence
  Description of Artificial Sequence: Synthetic polynucleotide
  VL (4B6)
gaaattgtgttgacgcagtctccaggcaccctgtctttgtctccaggggaaagagccaccctctcctgcagggccagtcagagtgttagcagcagcttcttagcctggtaccagcagaaacctggccaggctcccaggctcctcatctatggtgcatccagcagggccactggcatcccagacaggttcagtggcagtgggtctgggacagacttcactctcaccatcagcagactggagcctgaagattttgcagtgtattactgtcagcagtatggtagctcaccgtggacgttcggccaagggaccaaggtggaaatcaaac

SEQ ID NO: 759 - DNA, 358 bp, Artificial Sequence
  Description of Artificial Sequence: Synthetic polynucleotide
  VH (1E2)
caggtgcagctggtggagtctgggggaggcgtggtccagcctgggaggtccctgagactctcctgtgcagcgtctggattcaccttcagtagctatggcatgcactgggtccgccaggctccaggcaaggggctggagtgggtggcagttatatggtatgatggaagtaataaatactatgcagactccgtgaagggccgattcaccatctccagagacaattccaagaacacgctgtatctgcaaatgaacagcctgagagccgaggacacggctgtgttttactgtgcgagagctcccaattatattggtgcttttgatgtctggggccaagggacaatggtcaccgtctcttcag

SEQ ID NO: 760 - DNA, 322 bp, Artificial Sequence
  Description of Artificial Sequence: Synthetic polynucleotide
  VL (1E2)
gacatccagatgacccagtctccatcctcactgtctgcatctgtaggagacagagtcaccatcacttgtcgggcgagtcagggtattagcagctggttagcctggtatcagcagaaaccagagaaagcccctaagtccctgatctatgctgcatccagtttgcaaagtggggtcccatcaaggttcagcggcagtggatctgggacagatttcactctcaccatcagcagcctgcagcctgaagattttgcaacttattactgccaacagtataatagttaccctccgacgttcggccaagggaccaaggtggaaatcaaac

SEQ ID NO: 761 - protein, 451 aa, Artificial Sequence
  Description of Artificial Sequence: Synthetic polypeptide
  Heavy chain (human monoclonal)
QVQLVESGGGVVQPGRSLRLSCAASGFTFSSYGMHWVRQAPGKGLEWVAVIWYDGSNKYYADSVKGRFTISRDNSKNTLYLQMNSLRAEDTAVYYCARDPRGATLYYYYYGMDVWGQGTTVTVSSASTKGPSVFPLAPCSRSTSESTAALGCLVKDYFPEPVTVSWNSGALTSGVHTFPAVLQSSGLYSLSSVVTVPSSNFGTQTYTCNVDHKPSNTKVDKTVERKCCVECPPCPAPPVAGPSVFLFPPKPKDTLMISRTPEVTCVVVDVSHEDPEVQFNWYVDGVEVHNAKTKPREEQFNSTFRVVSVLTVVHQDWLNGKEYKCKVSNKGLPAPIEKTISKTKGQPREPQVYTLPPSREEMTKNQVSLTCLVKGFYPSDIAVEWESNGQPENNYKTTPPMLDSDGSFFLYSKLTVDKSRWQQGNVFSCSVMHEALHNHYTQKSLSLSPGK

SEQ ID NO: 762 - protein, 214 aa, Artificial Sequence; identical to SEQ ID NO: 10
  Description of Artificial Sequence: Synthetic polypeptide
  Light chain (human monoclonal)

SEQ ID NO: 763 - protein, 448 aa, Artificial Sequence; identical to SEQ ID NO: 5
  Description of Artificial Sequence: Synthetic polypeptide
  Heavy chain (human monoclonal)

SEQ ID NO: 764 - protein, 215 aa, Artificial Sequence; identical to SEQ ID NO: 7
  Description of Artificial Sequence: Synthetic polypeptide
  Light chain (human monoclonal)

SEQ ID NO: 765 - protein, 242 aa, Artificial Sequence
  Description of Artificial Sequence: Synthetic polypeptide
  anti CTLA-4 scFv; Heavy Chain  linker  Light Chain Transcribed from the native FliC promoter and 5UTR (untranslated region) with an optimized ribosome binding site
MQVQLVESGGGVVQPGRSLRLSCAASGFTFSSYTMHWVRQAPGKGLEWVTFISYDGNNKYYADSVKGRFTISRDNSKNTLYLQMNSLRAEDTAIYYCARTGWLGPFDYWGQGTLVTVSSGGGSGGGSGGGSGGGEIVLTQSPGTLSLSPGERATLSCRASQSVGSSYLAWYQQKPGQAPRLLIYGAFSRATGIPDRFSGSGSGTDFTLTISRLEPEDFAVYYCQQYGSSPWTFGQGTKVEIK

SEQ ID NO: 766 - DNA, 1103 bp, Artificial Sequence
  Description of Artificial Sequence: Synthetic polynucleotide
  anti CTLA-4 scFv; Codon-optimized Heavy Chain  linker Light Chain Transcribed from the native FliC promoter and 5UTR (untranslated region) with an optimized ribosome binding site
agcgggaataaggggcagagaaaagagtatttcgtcgactaacaaaaaatggctgtttgtgaaaaaaattctaaaggttgttttacgacagacgataacagggttgacggcgattgagccgacgggtggaaacccaaaacgtaatcaacaaataaaaatgaggaggcaattctaatgcaagtgcaactggtagagtccggtgggggcgtggtgcagccgggtcgcagcctgcgtctgtcgtgcgcggcgagtggttttacgttttcgagttatactatgcactgggttcgtcaagcgccgggcaaaggcctggaatgggttactttcatttcttacgatggtaataataaatattatgcggattctgtgaaaggtcgctttactatttcgcgcgataacagtaaaaacactctgtatctgcaaatgaattctctgcgtgcagaggatactgctatctattactgcgcgcgtacgggctggttgggcccgtttgattattggggccaaggcactttggttactgtgtcatcgggcgggggctctggcggtggttcaggtggtggcagtggtggtggcgagatcgtgttgactcaatctccgggtactctgtctctgtctccgggtgaacgcgcgaccctgtcttgccgcgcttctcagagtgttggttcatcgtatctggcatggtatcaacagaaaccgggtcaagcgccgcgtctgctgatttacggtgcttttagtcgcgcaaccgggattccggatcgattttctggttcaggttctggcactgactttactttgactattagtcgtctggaaccggaggacttcgcggtttattattgccaacagtatggttcttctccgtggacctttggtcaaggcactaaagttgaaattaaataatcgccgtaacctgattaactgagactgacggcaacgccaaattgcctgatgcgctgcgcttatcaggcctacaaggggaattgcaatttattgaatttgcacatttttgtaggccggataaggcgtttacgccgcatccggcaacatgaatggtaatttgccagcaacgtgcttccccgccaacggcggggttttttctg

SEQ ID NO: 767 - protein, 242 aa, Artificial Sequence
  Description of Artificial Sequence: Synthetic polypeptide
  anti CTLA-4 scFv; Light Chain  linker  Heavy Chain Transcribed from the native FliC promoter and 5UTR (untranslated region) with an optimized ribosome binding site
MEIVLTQSPGTLSLSPGERATLSCRASQSVGSSYLAWYQQKPGQAPRLLIYGAFSRATGIPDRFSGSGSGTDFTLTISRLEPEDFAVYYCQQYGSSPWTFGQGTKVEIKGGGSGGGSGGGSGGGQVQLVESGGGVVQPGRSLRLSCAASGFTFSSYTMHWVRQAPGKGLEWVTFISYDGNNKYYADSVKGRFTISRDNSKNTLYLQMNSLRAEDTAIYYCARTGWLGPFDYWGQGTLVTVSS

SEQ ID NO: 768 - DNA, 1103 bp, Artificial Sequence
  Description of Artificial Sequence: Synthetic polynucleotide
  anti CTLA-4 scFv; Codon-optimized Light Chain  linker Heavy Chain Transcribed from the native FliC promoter and 5UTR (untranslated region) with an optimized ribosome binding site
agcgggaataaggggcagagaaaagagtatttcgtcgactaacaaaaaatggctgtttgtgaaaaaaattctaaaggttgttttacgacagacgataacagggttgacggcgattgagccgacgggtggaaacccaaaacgtaatcaacagattataaggagttaaatagaaaaatggagattgtactgacccagagccctggtacattgtctttgtcgcctggtgaacgcgcgactctgtcttgtcgtgcgtctcagtctgttggtagttcgtatctggcgtggtatcaacaaaaaccgggccaagctccgcgtctgctgatttacggtgcatttagccgcgcgactggcattccggaccgcttttctgggtctggctcaggtaccgattttactctgactatttcgcgtctggagccggaggatttcgcggtttattactgccagcaatatggttctagtccgtggaccttcggccaaggtactaaagtggaaatcaaaggcgggggttcgggtggtggctctgggggtggctcgggcggtgggcaggtgcaactggttgagagtggtggcggcgttgttcaaccgggccgctctctgcgcctgtcgtgcgctgcttctggctttacctttagctcttatacgatgcactgggttcgccaagctccgggtaaaggtctggagtgggtgactttcatttcttacgatggtaacaacaaatattatgctgattctgttaaaggccgttttactatttctcgagacaatagcaaaaacactctgtacctgcagatgaattctctgcgcgctgaagacaccgcgatttattattgtgcgcgcactggttggctgggtccgtttgattattggggtcagggcacgctggttactgttagctcgtgatcgccgtaacctgattaactgagactgacggcaacgccaaattgcctgatgcgctgcgcttatcaggcctacaaggggaattgcaatttattgaatttgcacatttttgtaggccggataaggcgtttacgccgcatccggcaacatgaatggtaatttgccagcaacgtgcttccccgccaacggcggggttttttctg

SEQ ID NO: 769 - protein, 236 aa, Artificial Sequence
  Description of Artificial Sequence: Synthetic polypeptide
  anti PD-1 scFv; Heavy Chain  linker  Light Chain Transcribed from the native FliC promoter and 5UTR (untranslated region) with an optimized ribosome binding site
MQVQLVESGGGVVQPGRSLRLDCKASGITFSNSGMHWVRQAPGKGLEWVAVIWYDGSKRYYADSVKGRFTISRDNSKNTLFLQMNSLRAEDTAVYYCATNDDYWGQGTLVTVSSGGGSGGGSGGGSGGGEIVLTQSPATLSLSPGERATLSCRASQSVSSYLAWYQQKPGQAPRLLIYDASNRATGIPARFSGSGSGTDFTLTISSLEPEDFAVYYCQQSSNWPRTFGQGTKVEIK

SEQ ID NO: 770 - DNA, 1095 bp, Artificial Sequence
  Description of Artificial Sequence: Synthetic polynucleotide
  anti PD-1 scFv; Codon-optimized Heavy Chain  linker Light Chain Transcribed from the native FliC promoter and 5UTR (untranslated region) with an optimized ribosome binding site
agcgggaataaggggcagagaaaagagtatttcgtcgactaacaaaaaatggctgtttgtgaaaaaaattctaaaggttgttttacgacagacgataacagggttgacggcgattgagccgacgggtggaaacccaaaacgtaatcaacctcaaagaattataggaaaggaggaagcgataagtatgcaggtgcaattggtggagtcgggtggcggcgtggtgcaaccgggtcgtagcctgcgcctggattgtaaagcgtcaggcatcacgtttagcaattctggcatgcactgggtgcgtcaagcgccgggcaaaggtctggagtgggttgcggtaatttggtacgatggttctaaacgctattacgcggatagtgtgaaaggtcgctttactatctctcgcgataattctaaaaacaccctgtttctgcaaatgaattcgttgcgtgcggaagatactgcggtatattattgtgctactaacgatgattattggggtcaaggcaccctggtgactgtttcgagcggcggtggtagcggcggcggctctggtggtggttctggtggcggtgagattgtgctgactcaaagcccggcgaccctgtctctgtcgccgggtgaacgcgctactctgagttgccgtgcgtcgcaaagcgtgtcttcttatctggcgtggtaccaacaaaaaccgggtcaagcgccgcgcctgctgatatatgatgctagtaatcgtgcaacgggtattccggcacgcttttcaggttctggcagcggcaccgatttcactctgactatctcgtcactggagccggaagactttgcggtttattattgtcagcaatcttctaattggccgcgtacgtttggtcagggcactaaagttgaaatcaaataatcgccgtaacctgattaactgagactgacggcaacgccaaattgcctgatgcgctgcgcttatcaggcctacaaggggaattgcaatttattgaatttgcacatttttgtaggccggataaggcgtttacgccgcatccggcaacatgaatggtaatttgccagcaacgtgcttccccgccaacggcggggttttttctg

SEQ ID NO: 771 - protein, 236 aa, Artificial Sequence
  Description of Artificial Sequence: Synthetic polypeptide
  anti PD-1 scFv; Light Chain  linker  Heavy Chain Transcribed from the native FliC promoter and 5UTR (untranslated region) with an optimized ribosome binding site
MEIVLTQSPATLSLSPGERATLSCRASQSVSSYLAWYQQKPGQAPRLLIYDASNRATGIPARFSGSGSGTDFTLTISSLEPEDFAVYYCQQSSNWPRTFGQGTKVEIKGGGSGGGSGGGSGGGQVQLVESGGGVVQPGRSLRLDCKASGITFSNSGMHWVRQAPGKGLEWVAVIWYDGSKRYYADSVKGRFTISRDNSKNTLFLQMNSLRAEDTAVYYCATNDDYWGQGTLVTVSS

SEQ ID NO: 772 - DNA, 1085 bp, Artificial Sequence
  Description of Artificial Sequence: Synthetic polynucleotide
  anti PD-1 scFv; Codon-optimized Light Chain  linker Heavy Chain Transcribed from the native FliC promoter and 5UTR (untranslated region) with an optimized ribosome binding site
agcgggaataaggggcagagaaaagagtatttcgtcgactaacaaaaaatggctgtttgtgaaaaaaattctaaaggttgttttacgacagacgataacagggttgacggcgattgagccgacgggtggaaacccaaaacgtaatcaacatcaccaatttgaggaaaggtaaatatggaaatcgttttaacgcagtcgccggcgactctgtctttgtcgcctggtgaacgtgctacgctgtcttgccgcgcgtcacagtctgtgtcgtcatatctggcttggtaccaacagaaaccgggccaagctccgcgcctgctgatttatgatgcgtctaatcgcgcgaccggcattccggcgcgtttttctggctccggctctggcaccgactttactctgactatttcgtctctggaaccggaagattttgcggtgtactattgccagcaatcttctaattggccgcgcacgtttggtcaaggtaccaaggttgagatcaaaggtggtggctcgggcggcggttcgggcggcggctcaggtggtggccaagttcagttggttgagtctggcgggggcgtagtacaaccgggtcgttctttgcgtctggattgcaaagcgagcggtattacctttagcaattcaggtatgcactgggtgcgccaagcgccgggcaaaggcctggaatgggttgcggtgatttggtacgatggctcgaaacgttattatgctgacagcgttaaaggtcgttttactattagccgtgataattccaaaaatacgctgtttctgcagatgaatagcctgcgtgctgaagacactgcggtttattactgtgctactaatgatgattactggggccagggcaccctggtgactgtgagttcttaatcgccgtaacctgattaactgagactgacggcaacgccaaattgcctgatgcgctgcgcttatcaggcctacaaggggaattgcaatttattgaatttgcacatttttgtaggccggataaggcgtttacgccgcatccggcaacatgaatggtaatttgccagcaacgtgcttccccgccaacggcggggttttttctg

SEQ ID NO: 773 - protein, 242 aa, Artificial Sequence
  Description of Artificial Sequence: Synthetic polypeptide
  anti PDL-1 scFv; Heavy Chain  linker  Light Chain Transcribed from the native FliC promoter and 5UTR (untranslated region) with an optimized ribosome binding site
MEVQLVESGGGLVQPGGSLRLSCAASGFTFSDSWIHWVRQAPGKGLEWVAWISPYGGSTYYADSVKGRFTISADTSKNTAYLQMNSLRAEDTAVYYCARRHWPGGFDYWGQGTLVTVSSGGGSGGGSGGGSGGGDIQMTQSPSSLSASVGDRVTITCRASQDVSTAVAWYQQKPGKAPKLLIYSASFLYSGVPSRFSGSGSGTDFTLTISSLQPEDFATYYCQQYLYHPATFGQGTKVEIKR

SEQ ID NO: 774 - DNA, 1103 bp, Artificial Sequence
  Description of Artificial Sequence: Synthetic polynucleotide
  anti PDL-1 scFv; Codon-optimized Heavy Chain  linker Light Chain Transcribed from the native FliC promoter and 5UTR (untranslated region) with an optimized ribosome binding site
agcgggaataaggggcagagaaaagagtatttcgtcgactaacaaaaaatggctgtttgtgaaaaaaattctaaaggttgttttacgacagacgataacagggttgacggcgattgagccgacgggtggaaacccaaaacgtaatcaactacataattttggggagggtactcgatggaagttcagctggtggagagtggtggcggtctggtgcagccgggcggctctctgcgtctgagctgtgcggcgtctggctttacgttttctgacagttggattcactgggtgcgccaagcaccgggcaaaggcctggagtgggtggcgtggatttctccgtatggcggtagtacttattatgctgattctgtgaaaggccgttttaccatttcggcggacacttcaaaaaataccgcgtatctgcaaatgaatagcctgcgcgctgaagacacggctgtttactactgtgctcgccgccactggccgggcggtttcgattattggggccaaggcactctggtgactgtgagctctggcggcgggtcgggtggcggttctggcggtggcagtggcggtggtgatattcaaatgacccaatctccgtcgtctctgagcgcgtctgtgggcgatcgtgtaaccattacttgtcgtgcgtcgcaggatgtgtctactgctgtggcgtggtatcagcaaaaaccgggtaaagctccgaaactgctgatttatagcgcttcttttctgtatagtggtgttccgtcacgttttagcggttcaggctctggtactgatttcacactgactatttcttctctgcaaccggaagatttcgcgacttattattgtcagcagtacttgtaccacccggcaacttttggtcagggcactaaagttgaaattaaacgttaatcgccgtaacctgattaactgagactgacggcaacgccaaattgcctgatgcgctgcgcttatcaggcctacaaggggaattgcaatttattgaatttgcacatttttgtaggccggataaggcgtttacgccgcatccggcaacatgaatggtaatttgccagcaacgtgcttccccgccaacggcggggttttttctg

SEQ ID NO: 775 - protein, 242 aa, Artificial Sequence
  Description of Artificial Sequence: Synthetic polypeptide
  anti PDL-1 scFv; Light Chain  linker  Heavy Chain Transcribed from the native FliC promoter and 5UTR (untranslated region) with an optimized ribosome binding site
MDIQMTQSPSSLSASVGDRVTITCRASQDVSTAVAWYQQKPGKAPKLLIYSASFLYSGVPSRFSGSGSGTDFTLTISSLQPEDFATYYCQQYLYHPATFGQGTKVEIKRGGGSGGGSGGGSGGGEVQLVESGGGLVQPGGSLRLSCAASGFTFSDSWIHWVRQAPGKGLEWVAWISPYGGSTYYADSVKGRFTISADTSKNTAYLQMNSLRAEDTAVYYCARRHWPGGFDYWGQGTLVTVSS

SEQ ID NO: 776 - DNA, 1103 bp, Artificial Sequence
  Description of Artificial Sequence: Synthetic polynucleotide
  anti PDL-1 scFv; Codon-optimized Light Chain  linker Heavy Chain Transcribed from the native FliC promoter and 5UTR (untranslated region) with an optimized ribosome binding site
agcgggaataaggggcagagaaaagagtatttcgtcgactaacaaaaaatggctgtttgtgaaaaaaattctaaaggttgttttacgacagacgataacagggttgacggcgattgagccgacgggtggaaacccaaaacgtaatcaactggcagacgcctaaggaggaagaccatggatattcagatgactcagagccctagctcactgtctgcgtcagttggcgatcgtgtgactattacctgtcgcgctagtcaggatgtgtctacggcggttgcgtggtatcaacagaaaccgggcaaagctccgaaactgttgatttattcagcgtctttcctgtattcgggtgtgccttctcgcttttcgggctctggtagcggtactgattttacgctgactattagttcactgcaaccggaggactttgcgacttattattgccaacaatacctgtatcacccggcgacctttggtcaaggcactaaagtggaaattaaacgcggcggcggcagcggtggcggctctggtggtgggtctggtggtggtgaggttcagctggttgagtctggtggtggtctggttcaacctgggggcagcctgcgcctgtcgtgcgcggcgtctggttttacgttctcagattcttggattcactgggtacgtcaagctccgggcaaaggtctggagtgggtggcgtggatttctccgtatggcggttcgacgtattacgcggactctgttaaagggcgttttacgatctcagcggatacttctaaaaatactgcgtatctgcaaatgaattctctgcgagcggaggataccgcggtgtattactgtgctcgccgccactggcctggtggtttcgattattggggtcaaggtaccctggtgactgtttcgtcttaatcgccgtaacctgattaactgagactgacggcaacgccaaattgcctgatgcgctgcgcttatcaggcctacaaggggaattgcaatttattgaatttgcacatttttgtaggccggataaggcgtttacgccgcatccggcaacatgaatggtaatttgccagcaacgtgcttccccgccaacggcggggttttttctg

SEQ ID NO: 777 - protein, 606 aa, Artificial Sequence
  Description of Artificial Sequence: Synthetic polypeptide
  anti CTLA-4 scFv
MNKVYSLKYCPVTGGLIVVSELASRVIKKTCRRLTHILLAGIPAVYLYYPQISQAGIVRQVQLVESGGGVVQPGRSLRLSCAASGFTFSSYTMHWVRQAPGKGLEWVTFISYDGNNKYYADSVKGRFTISRDNSKNTLYLQMNSLRAEDTAIYYCARTGWLGPFDYWGQGTLVTVSSGGGSGGGSGGGSGGGEIVLTQSPGTLSLSPGERATLSCRASQSVGSSYLAWYQQKPGQAPRLLIYGAFSRATGIPDRFSGSGSGTDFTLTISRLEPEDFAVYYCQQYGSSPWTFGQGTKVEIKFKAEADKAAAAKADSFMNAGYKNFMTEVNNLNKRMGDLRDTNGDAGAWARIMSGAGSADGGYSDNYTHVQVGFDKKHELDGVDLFTGVTMTYTDSSADSHAFSGKTKSVGGGLYASALFESGAYIDLIGKYIHHDNDYTGNFAGLGTKHYNTHSWYAGAETGYRYHLTEETFIEPQAELVYGAVSGKTFRWKDGDMDLSMKNRDFSPLIGRTGIELGKTFSGKDWSVTARAGTSWQFDLLNNGETVLRDASGEKRIKGEKDSRMLFNVGMNAQIKDNMRFGLEFEKSAFGKYNVDNAVNANFRYMF

SEQ ID NO: 778 - DNA, 2038 bp, Artificial Sequence
  Description of Artificial Sequence: Synthetic polynucleotide
  anti CTLA-4 scFv
atctaatctagacatcattaattcctaatttttgttgacactctatcattgatagagttattttaccactccctatcagtgatagagaaaagtgaattaaatatcaactagaggtcaccaaatgaacaaagtatatagcctgaaatattgcccagtaactgggggtctgattgtagtcagtgaactggcatcccgcgtcatcaaaaaaacctgccgtcgtctgactcacatcctgctggcgggtattccggctgtgtatctgtactacccgcagatctcccaggcaggtatcgtccgccaggtacaattagttgagagcggcggcggtgtggttcaaccgggccgtagtctgcgattgtcttgtgctgcatctggttttactttcagttcttacacgatgcactgggttcgccaagctccgggcaaaggcctggagtgggttacctttatttcttacgatggcaataataagtattacgctgattctgtgaaaggtcgctttactattagccgagataactctaaaaatactctgtatctgcaaatgaattctctgcgtgcggaagatactgcgatctattattgtgcgcgtactggttggctgggcccgtttgattattggggccaaggcacgctggttactgttagttcgggcggcggttctggtggcggctctggtggtggctctggcggcggcgagattgtgctgactcaatctccgggcacgctgtcactgtctccgggtgaacgcgcgaccctgtcttgtcgcgcgagtcaaagtgttggttcttcttatctggcttggtatcagcaaaagcctggtcaagcgccgcgtctgttgatttatggcgcgttttcgcgcgcgactggcattccggaccgattttctggttctggttctggcactgatttcactctgaccatttcacgcctggaaccggaggattttgcggtgtactattgccaacaatatggctcatcgccgtggacgtttggccaaggtactaaagttgagattaaattcaaagcggaggctgacaaggccgctgcagcaaaagctgactcctttatgaacgcgggttacaaaaacttcatgaccgaggtaaataatctcaataaacgtatgggtgatctgcgcgacactaatggggatgcaggcgcatgggcacgcattatgtctggtgcaggttcggcggatggcgggtattctgacaattacactcatgttcaggtgggcttcgataaaaaacatgagctggacggtgtggatctgttcactggcgtaaccatgacttatactgattcaagcgcagacagccacgcattttcaggtaaaacgaaatcagttggcggcggtctgtatgcgagcgcactgttcgagagcggcgcctacattgatctaattggcaagtatattcaccatgataatgattacacagggaactttgcaggcctgggcaccaaacactataacacgcattcatggtacgctggcgcagaaaccggctatagataccacctgaccgaggaaacctttatcgaaccgcaagcggaactggtttacggtgcggtcagtggcaagacctttcgttggaaagatggtgatatggatctgtcaatgaaaaaccgcgacttcagccccttgatcggccgcaccggcattgagctgggcaaaaccttctctggcaaagattggtctgttaccgcgcgtgcgggcacttcgtggcaatttgatctgctaaacaacggtgagactgtactgcgtgatgcgagtggcgaaaaacgtattaaaggtgaaaaagatagtagaatgctattcaacgtgggcatgaatgcgcagatcaaagataacatgcgttttgggttggagtttgaaaaatccgcgttcggtaaatataatgttgacaatgctgtgaacgcgaatttccgctacatgttttaactctaacggacttgagtgaggttgtaaagggagttggctcctcggtaccaaattccagaaaagaggcctcccgaaaggggggccttttttcgtttt

SEQ ID NO: 779 - protein, 606 aa, Artificial Sequence
  Description of Artificial Sequence: Synthetic polypeptide
  anti CTLA-4 scFv
MNKVYSLKYCPVTGGLIVVSELASRVIKKTCRRLTHILLAGIPAVYLYYPQISQAGIVREIVLTQSPGTLSLSPGERATLSCRASQSVGSSYLAWYQQKPGQAPRLLIYGAFSRATGIPDRFSGSGSGTDFTLTISRLEPEDFAVYYCQQYGSSPWTFGQGTKVEIKGGGSGGGSGGGSGGGQVQLVESGGGVVQPGRSLRLSCAASGFTFSSYTMHWVRQAPGKGLEWVTFISYDGNNKYYADSVKGRFTISRDNSKNTLYLQMNSLRAEDTAIYYCARTGWLGPFDYWGQGTLVTVSSFKAEADKAAAAKADSFMNAGYKNFMTEVNNLNKRMGDLRDTNGDAGAWARIMSGAGSADGGYSDNYTHVQVGFDKKHELDGVDLFTGVTMTYTDSSADSHAFSGKTKSVGGGLYASALFESGAYIDLIGKYIHHDNDYTGNFAGLGTKHYNTHSWYAGAETGYRYHLTEETFIEPQAELVYGAVSGKTFRWKDGDMDLSMKNRDFSPLIGRTGIELGKTFSGKDWSVTARAGTSWQFDLLNNGETVLRDASGEKRIKGEKDSRMLFNVGMNAQIKDNMRFGLEFEKSAFGKYNVDNAVNANFRYMF

SEQ ID NO: 780 - DNA, 2038 bp, Artificial Sequence
  Description of Artificial Sequence: Synthetic polynucleotide
  anti CTLA-4 scFv
atctaatctagacatcattaattcctaatttttgttgacactctatcattgatagagttattttaccactccctatcagtgatagagaaaagtgaattaaatatcaactagaggtcaccaaatgaacaaagtatatagcctgaaatattgcccagtaactgggggtctgattgtagtcagtgaactggcatcccgcgtcatcaaaaaaacctgccgtcgtctgactcacatcctgctggcgggtattccggctgtgtatctgtactacccgcagatctcccaggcaggtatcgtccgcgaaattgtactgacccagtcgcctggtaccctgtctctgtcgccgggtgaacgtgctaccctgtcttgtcgtgcttcgcaatcggttggctcgtcttatctggcatggtatcagcaaaaaccgggccaagcgcctcgtctgctgatttatggcgcgttttctcgtgctacgggcattcctgatcgtttttcgggctctggctctggtactgattttacgctgactatcagccgcttggaacctgaagattttgcggtttattattgccaacaatatggctcttctccgtggacgtttggtcaaggcactaaagttgaaattaaaggtggtggctcgggcggtggttctggtggtggtagtggtggtggtcaagtgcagttggttgaatcgggtggcggtgttgtgcagccgggccgttcgttgcgtctgtcttgcgcagcgagtggtttcaccttctcttcttatactatgcactgggtgcgtcaagcacctggcaaaggtctggagtgggtaacttttatttcatacgatggtaataataaatattatgcagattctgttaaaggtcgctttacgatttctcgcgataattcaaaaaatacgctgtatctgcagatgaattcgctgcgcgctgaggatactgcgatctactattgtgcgcgtactggttggctgggtccgtttgattactggggccaaggtacgctggttacagtttcgtcgttcaaagcggaggctgacaaggccgctgcagcaaaagctgactcctttatgaacgcgggttacaaaaacttcatgaccgaggtaaataatctcaataaacgtatgggtgatctgcgcgacactaatggggatgcaggcgcatgggcacgcattatgtctggtgcaggttcggcggatggcgggtattctgacaattacactcatgttcaggtgggcttcgataaaaaacatgagctggacggtgtggatctgttcactggcgtaaccatgacttatactgattcaagcgcagacagccacgcattttcaggtaaaacgaaatcagttggcggcggtctgtatgcgagcgcactgttcgagagcggcgcctacattgatctaattggcaagtatattcaccatgataatgattacacagggaactttgcaggcctgggcaccaaacactataacacgcattcatggtacgctggcgcagaaaccggctatagataccacctgaccgaggaaacctttatcgaaccgcaagcggaactggtttacggtgcggtcagtggcaagacctttcgttggaaagatggtgatatggatctgtcaatgaaaaaccgcgacttcagccccttgatcggccgcaccggcattgagctgggcaaaaccttctctggcaaagattggtctgttaccgcgcgtgcgggcacttcgtggcaatttgatctgctaaacaacggtgagactgtactgcgtgatgcgagtggcgaaaaacgtattaaaggtgaaaaagatagtagaatgctattcaacgtgggcatgaatgcgcagatcaaagataacatgcgttttgggttggagtttgaaaaatccgcgttcggtaaatataatgttgacaatgctgtgaacgcgaatttccgctacatgttttaactctaacggacttgagtgaggttgtaaagggagttggctcctcggtaccaaattccagaaaagaggcctcccgaaaggggggccttttttcgtttt

SEQ ID NO: 781 - protein, 600 aa, Artificial Sequence
  Description of Artificial Sequence: Synthetic polypeptide
  anti PD-1 scFv
MNKVYSLKYCPVTGGLIVVSELASRVIKKTCRRLTHILLAGIPAVYLYYPQISQAGIVRQVQLVESGGGVVQPGRSLRLDCKASGITFSNSGMHWVRQAPGKGLEWVAVIWYDGSKRYYADSVKGRFTISRDNSKNTLFLQMNSLRAEDTAVYYCATNDDYWGQGTLVTVSSGGGSGGGSGGGSGGGEIVLTQSPATLSLSPGERATLSCRASQSVSSYLAWYQQKPGQAPRLLIYDASNRATGIPARFSGSGSGTDFTLTISSLEPEDFAVYYCQQSSNWPRTFGQGTKVEIKFKAEADKAAAAKADSFMNAGYKNFMTEVNNLNKRMGDLRDTNGDAGAWARIMSGAGSADGGYSDNYTHVQVGFDKKHELDGVDLFTGVTMTYTDSSADSHAFSGKTKSVGGGLYASALFESGAYIDLIGKYIHHDNDYTGNFAGLGTKHYNTHSWYAGAETGYRYHLTEETFIEPQAELVYGAVSGKTFRWKDGDMDLSMKNRDFSPLIGRTGIELGKTFSGKDWSVTARAGTSWQFDLLNNGETVLRDASGEKRIKGEKDSRMLFNVGMNAQIKDNMRFGLEFEKSAFGKYNVDNAVNANFRYMF

SEQ ID NO: 782 - DNA, 2020 bp, Artificial Sequence
  Description of Artificial Sequence: Synthetic polynucleotide
  anti PD-1 scFv
atctaatctagacatcattaattcctaatttttgttgacactctatcattgatagagttattttaccactccctatcagtgatagagaaaagtgaattaaatatcaactagaggtcaccaaatgaacaaagtatatagcctgaaatattgcccagtaactgggggtctgattgtagtcagtgaactggcatcccgcgtcatcaaaaaaacctgccgtcgtctgactcacatcctgctggcgggtattccggctgtgtatctgtactacccgcagatctcccaggcaggtatcgtccgccaagtacaactggttgaatccggcggaggagtggtgcaaccgggccgcagtttgcgtctggattgtaaagcttcaggcatcactttttctaattctggtatgcactgggttcgccaagctccgggtaaaggtctggagtgggttgcggtgatctggtatgatggttctaaacgatattatgcggatagtgttaagggtcgttttactatttctcgtgataattctaagaacaccttgtttctgcagatgaatagtctgcgcgctgaggatactgcggtatattattgtgcgactaatgacgattattggggccaaggcacgctggttaccgtgagctctggtggtggttcgggtggtggttctggtggtgggagcggcggtggcgagatcgttctgactcaaagcccggcgactctgagtctgagtccgggtgaacgtgcgactctgagctgccgtgcgtctcagagtgtgtcgagttatctggcgtggtaccaacaaaaaccgggccaggcgccgcgactgctgatttatgatgcttctaatcgtgcgactggtattccggcgcgctttagcggttctggctcaggcactgacttcactctgactatttcttcgctggaaccggaagattttgcggtgtactattgtcaacaatcatctaattggcctcgtacgttcggtcaaggtacaaaagtggagataaaattcaaagcggaggctgacaaggccgctgcagcaaaagctgactcctttatgaacgcgggttacaaaaacttcatgaccgaggtaaataatctcaataaacgtatgggtgatctgcgcgacactaatggggatgcaggcgcatgggcacgcattatgtctggtgcaggttcggcggatggcgggtattctgacaattacactcatgttcaggtgggcttcgataaaaaacatgagctggacggtgtggatctgttcactggcgtaaccatgacttatactgattcaagcgcagacagccacgcattttcaggtaaaacgaaatcagttggcggcggtctgtatgcgagcgcactgttcgagagcggcgcctacattgatctaattggcaagtatattcaccatgataatgattacacagggaactttgcaggcctgggcaccaaacactataacacgcattcatggtacgctggcgcagaaaccggctatagataccacctgaccgaggaaacctttatcgaaccgcaagcggaactggtttacggtgcggtcagtggcaagacctttcgttggaaagatggtgatatggatctgtcaatgaaaaaccgcgacttcagccccttgatcggccgcaccggcattgagctgggcaaaaccttctctggcaaagattggtctgttaccgcgcgtgcgggcacttcgtggcaatttgatctgctaaacaacggtgagactgtactgcgtgatgcgagtggcgaaaaacgtattaaaggtgaaaaagatagtagaatgctattcaacgtgggcatgaatgcgcagatcaaagataacatgcgttttgggttggagtttgaaaaatccgcgttcggtaaatataatgttgacaatgctgtgaacgcgaatttccgctacatgttttaactctaacggacttgagtgaggttgtaaagggagttggctcctcggtaccaaattccagaaaagaggcctcccgaaaggggggccttttttcgtttt

SEQ ID NO: 783 - protein, 600 aa, Artificial Sequence
  Description of Artificial Sequence: Synthetic polypeptide
  anti PD-1 scFv
MNKVYSLKYCPVTGGLIVVSELASRVIKKTCRRLTHILLAGIPAVYLYYPQISQAGIVREIVLTQSPATLSLSPGERATLSCRASQSVSSYLAWYQQKPGQAPRLLIYDASNRATGIPARFSGSGSGTDFTLTISSLEPEDFAVYYCQQSSNWPRTFGQGTKVEIKGGGSGGGSGGGSGGGQVQLVESGGGVVQPGRSLRLDCKASGITFSNSGMHWVRQAPGKGLEWVAVIWYDGSKRYYADSVKGRFTISRDNSKNTLFLQMNSLRAEDTAVYYCATNDDYWGQGTLVTVSSFKAEADKAAAAKADSFMNAGYKNFMTEVNNLNKRMGDLRDTNGDAGAWARIMSGAGSADGGYSDNYTHVQVGFDKKHELDGVDLFTGVTMTYTDSSADSHAFSGKTKSVGGGLYASALFESGAYIDLIGKYIHHDNDYTGNFAGLGTKHYNTHSWYAGAETGYRYHLTEETFIEPQAELVYGAVSGKTFRWKDGDMDLSMKNRDFSPLIGRTGIELGKTFSGKDWSVTARAGTSWQFDLLNNGETVLRDASGEKRIKGEKDSRMLFNVGMNAQIKDNMRFGLEFEKSAFGKYNVDNAVNANFRYMF

SEQ ID NO: 784 - DNA, 2020 bp, Artificial Sequence
  Description of Artificial Sequence: Synthetic polynucleotide
  anti PD-1 scFv
atctaatctagacatcattaattcctaatttttgttgacactctatcattgatagagttattttaccactccctatcagtgatagagaaaagtgaattaaatatcaactagaggtcaccaaatgaacaaagtatatagcctgaaatattgcccagtaactgggggtctgattgtagtcagtgaactggcatcccgcgtcatcaaaaaaacctgccgtcgtctgactcacatcctgctggcgggtattccggctgtgtatctgtactacccgcagatctcccaggcaggtatcgtccgcgaaatcgtgctgactcagagtccggcgactctgtctctgagtccgggcgaacgcgcgactctgtcttgccgtgcgtctcaatctgtgtcttcatacttggcttggtaccaacaaaaaccgggccaggcgccgcgactgttgatttatgatgcgtcgaatcgcgcgactggcattccggcgcgcttttcgggtagcggttctggtactgattttacgctgactatctcttctctggagcctgaagatttcgctgtttattactgccaacagtctagtaattggccgcgtactttcggccagggcactaaggtggaaattaaaggtggcggctcgggcggcggctcgggtggtggttctggtggtggccaagtgcaactggtggaaagtggcggcggggtggtgcaaccgggccgttctctgcgcctggattgtaaagcttcaggcattacttttagcaactctggtatgcactgggttcgccaagctccgggcaaaggcctggaatgggtggcggttatttggtacgatggctctaaacgttattacgctgacagtgttaaaggccgctttaccatttctcgtgataattctaaaaataccctgtttctgcaaatgaactcgctgcgcgcggaagatactgctgtttactattgtgcgactaatgatgattactggggtcaaggtaccctggttaccgtgtcttctttcaaagcggaggctgacaaggccgctgcagcaaaagctgactcctttatgaacgcgggttacaaaaacttcatgaccgaggtaaataatctcaataaacgtatgggtgatctgcgcgacactaatggggatgcaggcgcatgggcacgcattatgtctggtgcaggttcggcggatggcgggtattctgacaattacactcatgttcaggtgggcttcgataaaaaacatgagctggacggtgtggatctgttcactggcgtaaccatgacttatactgattcaagcgcagacagccacgcattttcaggtaaaacgaaatcagttggcggcggtctgtatgcgagcgcactgttcgagagcggcgcctacattgatctaattggcaagtatattcaccatgataatgattacacagggaactttgcaggcctgggcaccaaacactataacacgcattcatggtacgctggcgcagaaaccggctatagataccacctgaccgaggaaacctttatcgaaccgcaagcggaactggtttacggtgcggtcagtggcaagacctttcgttggaaagatggtgatatggatctgtcaatgaaaaaccgcgacttcagccccttgatcggccgcaccggcattgagctgggcaaaaccttctctggcaaagattggtctgttaccgcgcgtgcgggcacttcgtggcaatttgatctgctaaacaacggtgagactgtactgcgtgatgcgagtggcgaaaaacgtattaaaggtgaaaaagatagtagaatgctattcaacgtgggcatgaatgcgcagatcaaagataacatgcgttttgggttggagtttgaaaaatccgcgttcggtaaatataatgttgacaatgctgtgaacgcgaatttccgctacatgttttaactctaacggacttgagtgaggttgtaaagggagttggctcctcggtaccaaattccagaaaagaggcctcccgaaaggggggccttttttcgtttt

SEQ ID NO: 785 - protein, 606 aa, Artificial Sequence
  Description of Artificial Sequence: Synthetic polypeptide
  anti PDL-1 scFv
MNKVYSLKYCPVTGGLIVVSELASRVIKKTCRRLTHILLAGIPAVYLYYPQISQAGIVRDIQMTQSPSSLSASVGDRVTITCRASQDVSTAVAWYQQKPGKAPKLLIYSASFLYSGVPSRFSGSGSGTDFTLTISSLQPEDFATYYCQQYLYHPATFGQGTKVEIKRGGGSGGGSGGGSGGGEVQLVESGGGLVQPGGSLRLSCAASGFTFSDSWIHWVRQAPGKGLEWVAWISPYGGSTYYADSVKGRFTISADTSKNTAYLQMNSLRAEDTAVYYCARRHWPGGFDYWGQGTLVTVSSFKAEADKAAAAKADSFMNAGYKNFMTEVNNLNKRMGDLRDTNGDAGAWARIMSGAGSADGGYSDNYTHVQVGFDKKHELDGVDLFTGVTMTYTDSSADSHAFSGKTKSVGGGLYASALFESGAYIDLIGKYIHHDNDYTGNFAGLGTKHYNTHSWYAGAETGYRYHLTEETFIEPQAELVYGAVSGKTFRWKDGDMDLSMKNRDFSPLIGRTGIELGKTFSGKDWSVTARAGTSWQFDLLNNGETVLRDASGEKRIKGEKDSRMLFNVGMNAQIKDNMRFGLEFEKSAFGKYNVDNAVNANFRYMF

SEQ ID NO: 786 - DNA, 2038 bp, Artificial Sequence
  Description of Artificial Sequence: Synthetic polynucleotide
  anti PDL-1 scFv
atctaatctagacatcattaattcctaatttttgttgacactctatcattgatagagttattttaccactccctatcagtgatagagaaaagtgaattaaatatcaactagaggtcaccaaatgaacaaagtatatagcctgaaatattgcccagtaactgggggtctgattgtagtcagtgaactggcatcccgcgtcatcaaaaaaacctgccgtcgtctgactcacatcctgctggcgggtattccggctgtgtatctgtactacccgcagatctcccaggcaggtatcgtccgcgaagtgcagctggtggagtcaggtggaggcttggtgcaaccgggcggttcactgcgtctgtcatgtgcggcgtctgggtttacttttagtgactcttggattcactgggtgcgccaggctccgggtaaaggcctggaatgggtagcttggattagtccttacggtggctcgacctattatgctgattcggtaaagggtcgctttactattagcgctgatacttctaaaaatactgcatacctgcagatgaatagcctgcgcgctgaggatactgctgtgtattattgcgcgcgtcgccactggccgggcggctttgattattggggccaaggtactctggttaccgtgtctagtggcggtggtagcggcggcggctcaggtggcggctcgggcggtggcgacattcagatgactcagtctccgtcttctttgtcggcgagcgtgggcgatcgtgttaccatcacgtgtcgcgcgagccaagatgtgtcgactgcggtggcttggtatcaacaaaaaccgggtaaagctccgaaactgctgatttatagtgcgtcttttttgtattctggtgttccgtctcgtttctctggctcaggtagcggtactgattttacgctgactatttcttcactgcaaccggaagattttgctacgtattattgtcaacaatatctgtatcacccggcgacgtttggtcagggtactaaggtggagataaaacgcttcaaagcggaggctgacaaggccgctgcagcaaaagctgactcctttatgaacgcgggttacaaaaacttcatgaccgaggtaaataatctcaataaacgtatgggtgatctgcgcgacactaatggggatgcaggcgcatgggcacgcattatgtctggtgcaggttcggcggatggcgggtattctgacaattacactcatgttcaggtgggcttcgataaaaaacatgagctggacggtgtggatctgttcactggcgtaaccatgacttatactgattcaagcgcagacagccacgcattttcaggtaaaacgaaatcagttggcggcggtctgtatgcgagcgcactgttcgagagcggcgcctacattgatctaattggcaagtatattcaccatgataatgattacacagggaactttgcaggcctgggcaccaaacactataacacgcattcatggtacgctggcgcagaaaccggctatagataccacctgaccgaggaaacctttatcgaaccgcaagcggaactggtttacggtgcggtcagtggcaagacctttcgttggaaagatggtgatatggatctgtcaatgaaaaaccgcgacttcagccccttgatcggccgcaccggcattgagctgggcaaaaccttctctggcaaagattggtctgttaccgcgcgtgcgggcacttcgtggcaatttgatctgctaaacaacggtgagactgtactgcgtgatgcgagtggcgaaaaacgtattaaaggtgaaaaagatagtagaatgctattcaacgtgggcatgaatgcgcagatcaaagataacatgcgttttgggttggagtttgaaaaatccgcgttcggtaaatataatgttgacaatgctgtgaacgcgaatttccgctacatgttttaactctaacggacttgagtgaggttgtaaagggagttggctcctcggtaccaaattccagaaaagaggcctcccgaaaggggggccttttttcgtttt

SEQ ID NO: 787 - protein, 600 aa, Artificial Sequence; identical to SEQ ID NO: 783
  Description of Artificial Sequence: Synthetic polypeptide
  anti PDL-1 scFv

SEQ ID NO: 788 - DNA, 2038 bp, Artificial Sequence
  Description of Artificial Sequence: Synthetic polynucleotide
  anti PDL-1 scFv
atctaatctagacatcattaattcctaatttttgttgacactctatcattgatagagttattttaccactccctatcagtgatagagaaaagtgaattaaatatcaactagaggtcaccaaatgaacaaagtatatagcctgaaatattgcccagtaactgggggtctgattgtagtcagtgaactggcatcccgcgtcatcaaaaaaacctgccgtcgtctgactcacatcctgctggcgggtattccggctgtgtatctgtactacccgcagatctcccaggcaggtatcgtccgcgatattcaaatgactcaatctccgagctctctgagtgcgtctgtgggtgatcgtgtgactattacttgtcgtgcgtctcaagatgtttcaactgcggttgcgtggtatcaacagaaaccgggcaaggcgcctaagctgctgatttattctgcttcgttcctgtacagcggtgtgccgtctcgtttctctggctctggttcgggtactgatttcactctgactatttcgagtctgcagccggaagattttgcgacttattattgtcaacaatatctgtatcaccctgcgacgtttggtcaaggcacgaaagttgaaattaaacgtggtggtggctctggtggtggcagcggtggtgggtcgggtggcggtgaagttcaactggttgagtcaggtggtggcctggtgcaaccgggcggctctctgcgcctgtcttgtgctgcgtcgggttttacgttctctgatagctggattcactgggtacgccaggcaccgggcaaaggtctggaatgggtagcttggatttcaccttatggtggctctacttattacgcggatagcgtgaaaggtcgctttactatttctgcggacactagcaaaaatactgcttacctgcaaatgaattcgctgcgtgctgaggatactgcagtgtattactgtgcgcgtcgtcattggcctggcggctttgattattggggtcaaggtactctggttactgttagcagcttcaaagcggaggctgacaaggccgctgcagcaaaagctgactcctttatgaacgcgggttacaaaaacttcatgaccgaggtaaataatctcaataaacgtatgggtgatctgcgcgacactaatggggatgcaggcgcatgggcacgcattatgtctggtgcaggttcggcggatggcgggtattctgacaattacactcatgttcaggtgggcttcgataaaaaacatgagctggacggtgtggatctgttcactggcgtaaccatgacttatactgattcaagcgcagacagccacgcattttcaggtaaaacgaaatcagttggcggcggtctgtatgcgagcgcactgttcgagagcggcgcctacattgatctaattggcaagtatattcaccatgataatgattacacagggaactttgcaggcctgggcaccaaacactataacacgcattcatggtacgctggcgcagaaaccggctatagataccacctgaccgaggaaacctttatcgaaccgcaagcggaactggtttacggtgcggtcagtggcaagacctttcgttggaaagatggtgatatggatctgtcaatgaaaaaccgcgacttcagccccttgatcggccgcaccggcattgagctgggcaaaaccttctctggcaaagattggtctgttaccgcgcgtgcgggcacttcgtggcaatttgatctgctaaacaacggtgagactgtactgcgtgatgcgagtggcgaaaaacgtattaaaggtgaaaaagatagtagaatgctattcaacgtgggcatgaatgcgcagatcaaagataacatgcgttttgggttggagtttgaaaaatccgcgttcggtaaatataatgttgacaatgctgtgaacgcgaatttccgctacatgttttaactctaacggacttgagtgaggttgtaaagggagttggctcctcggtaccaaattccagaaaagaggcctcccgaaaggggggccttttttcgtttt

SEQ ID NO: 789 - protein, 294 aa, Artificial Sequence
  Description of Artificial Sequence: Synthetic polypeptide
  anti CTLA-4 scFv
MQVQLVESGGGVVQPGRSLRLSCAASGFTFSSYTMHWVRQAPGKGLEWVTFISYDGNNKYYADSVKGRFTISRDNSKNTLYLQMNSLRAEDTAIYYCARTGWLGPFDYWGQGTLVTVSSGGGSGGGSGGGSGGGEIVLTQSPGTLSLSPGERATLSCRASQSVGSSYLAWYQQKPGQAPRLLIYGAFSRATGIPDRFSGSGSGTDFTLTISRLEPEDFAVYYCQQYGSSPWTFGQGTKVEIKLNPLINEISKIISAAGNFDVKEERAAASLLQLSGNASDFSYGRNSITLTASA

SEQ ID NO: 790 - DNA, 5309 bp, Artificial Sequence
  Description of Artificial Sequence: Synthetic polynucleotide
  anti CTLA-4 scFv
gaattcgttaagacccactttcacatttaagttgtttttctaatccgcatatgatcaattcaaggccgaataagaaggctggctctgcaccttggtgatcaaataattcgatagcttgtcgtaataatggcggcatactatcagtagtaggtgtttccctttcttctttagcgacttgatgctcttgatcttccaatacgcaacctaaagtaaaatgccccacagcgctgagtgcatataatgcattctctagtgaaaaaccttgttggcataaaaaggctaattgattttcgagagtttcatactgtttttctgtaggccgtgtacctaaatgtacttttgctccatcgcgatgacttagtaaagcacatctaaaacttttagcgttattacgtaaaaaatcttgccagctttccccttctaaagggcaaaagtgagtatggtgcctatctaacatctcaatggctaaggcgtcgagcaaagcccgcttattttttacatgccaatacaatgtaggctgctctacacctagcttctgggcgagtttacgggttgttaaaccttcgattccgacctcattaagcagctctaatgcgctgttaatcactttacttttatctaatctagacatcattaattcctaatttttgttgacactctatcatttatagagttaatttaccactccctatcagtgatagagaaaagtgaatacgatttaattcggaggttttttgatgcaggtacaattagttgagagcggcggcggtgtggttcaaccgggccgtagtctgcgattgtcttgtgctgcatctggttttactttcagttcttacacgatgcactgggttcgccaagctccgggcaaaggcctggagtgggttacctttatttcttacgatggcaataataagtattacgctgattctgtgaaaggtcgctttactattagccgagataactctaaaaatactctgtatctgcaaatgaattctctgcgtgcggaagatactgcgatctattattgtgcgcgtactggttggctgggcccgtttgattattggggccaaggcacgctggttactgttagttcgggcggcggttctggtggcggctctggtggtggctctggcggcggcgagattgtgctgactcaatctccgggcacgctgtcactgtctccgggtgaacgcgcgaccctgtcttgtcgcgcgagtcaaagtgttggttcttcttatctggcttggtatcagcaaaagcctggtcaagcgccgcgtctgttgatttatggcgcgttttcgcgcgcgactggcattccggaccgattttctggttctggttctggcactgatttcactctgaccatttcacgcctggaaccggaggattttgcggtgtactattgccaacaatatggctcatcgccgtggacgtttggccaaggtactaaagttgagattaaacttaatccattaattaatgaaatcagcaaaatcatttcagctgcaggtaattttgatgttaaagaggaaagagctgcagcttctttattgcagttgtccggtaatgccagtgatttttcatatggacggaactcaataactttgacagcatcagcataatttattaatttaaataatagcaatcttactgggctgtgccacataagattgctatttttttggagtcataatggattcttgtcataaaattgattatgggttatacgccctggagattttagcccaataccataacgtctctgttaacccggaagaaattaaacatagatttgacacagacgggactggtctgggattaacgtcatggttgcttgctgcgaaatctttagaactaaaggtaaaacaggtaaaaaaaacaattgaccgattaaactttatttctttgcccgcattagtctggagagaggatggacgtcattttattctgactaaagtcagtaaagaagcaaacagatatcttatttttgatctggagcaacgaaatccccgtgttctcgaacagtctgagtttgaggcgttatatcaggggcatattattcttattgcttcccgttcttctgttaccgggaaactggcaaaatttgactttacctggtttatccctgccattataaaatacagaaaaatatttattgaaacccttgttgtatctgtttttttacaattatttgcattaataaccccccttttttttcaggtggttatggacaaagtattagtacacagggggttttcaacccttaatgttattactgtcgcattatctgttgtggtggtgtttgagattatactcagcggtttaagaacttacatttttgcacatagtacaagtcggattgatgttgagttgggtgccaaactcttccggcatttactggcgctaccgatctcttattttgagagtcgtcgtgttggtgatactgttgccagggtaagagaattagaccagatccgtaattttctgacaggacaggcattaacatctgttctggacttattattttcattcatattttttgcggtaatgtggtattacagcccaaagcttactctggtgatcttattttcgctgccctgttatgctgcatggtctgtttttattagccccattttgcgacgtcgccttgatgataagttttcacggaatgcggataatcaatctttcctggtggaatcagtcacggcgattaacactataaaagctatggcagtctcacctcagatgacgaacatatgggacaaacaattggcaggatatgttgctgcaggctttaaagtgacagtattagccaccattggtcaacaaggaatacagttaatacaaaagactgttatgatcatcaacctgtggttgggagcacacctggttatttccggggatttaagtattggtcagttaattgcttttaatatgcttgctggtcagattgttgcaccggttattcgccttgcacaaatctggcaggatttccagcaggttggtatatcagttacccgccttggtgatgtgcttaactctccaactgaaagttatcatgggaaactggcattaccggaaattaatggtaatatcacttttcgtaatatccggtttcgctataagcctgactctccggttattttagataatatcaatctcagtattaagcagggggaggttattggtattgtcggacgttctggttcaggaaaaagcacattaactaaattaattcaacgtttttatattcctgaaaatggccaggtcttaattgatggacatgatcttgcgttggccgatcctaactggttacgtcgtcaggtgggggttgtgttgcaggacaatgtgctgcttaatcgcagtattattgataatatctcactggctaatcctggtatgtccgtcgaaaaagttatttatgcagcgaaattagcaggcgctcatgattttatttctgaattgcgtgaggggtataacaccattgtcggggaacagggggcaggattatccggaggtcaacgtcaacgcatcgcaattgcaagggcgctggtgaacaaccctaaaatacttatttttgatgaagcaaccagtgctctggattatgagtcggagcatatcatcatgcgcaatatgcacaaaatatgtaagggcagaacggttataatcattgctcatcgtctgtctacagtaaaaaatgcagaccgcattattgtcatggaaaaagggaaaattgttgaacagggtaaacataaggaactgctttctgaaccggaaagtttatacagttacttatatcagttacagtcagactaacagaaagaacagaagaatatgaaaacatggttaatggggttcagcgagttcctgttgcgctataaacttgtctggagtgaaacatggaaaatccggaagcaattagatactccggtacgtgaaaaggacgaaaatgaattcttacccgctcatctggaattaattgaaacgccggtatccagacggccgcgtctggttgcttattttattatggggtttctggttattgctgtcattttatctgttttaggtcaggtggaaattgttgccactgcaaatgggaaattaacactaagtgggcgcagcaaagaaattaaacctattgaaaactcaatagttaaagaaattatcgtaaaagaaggagagtcagtccggaaaggggatgtgttattaaagcttacagcactgggagctgaagctgatacgttaaaaacacagtcatcactgttacagaccaggctggaacaaactcggtatcaaattctgagcaggtcaattgaattaaataaactacctgaactgaagcttcctgatgagccttattttcagaatgtatctgaagaggaagtactgcgtttaacttctttgataaaagaacagttttccacatggcaaaatcagaagtatcaaaaagaactgaatctggataagaaaagagcagagcgattaacaatacttgcccgtataaaccgttatgaaaatttatcgagagttgaaaaaagccgtctggatgatttcaggagtttattgcataaacaggcaattgcaaaacatgctgtacttgagcaggagaataaatatgtcgaggcagcaaatgaattacgggtttataaatcgcaactggagcaaattgagagtgagatattgtctgcaaaagaagaatatcagcttgtcacgcagctttttaaaaatgaaattttagacaagctaagacaaacaacagacaacattgagttattaactctggagttagagaaaaatgaagagcgtcaacaggcttcagtaatcagggcccctgtttcgggaaaagttcagcaactgaaggttcatactgaaggtggggttgttacaacagcggaaacactgatggtcatcgttccggaagatgacacgctggaggttactgctctggtacaaaataaagatattggttttattaacgtcgggcagaatgccatcattaaagtggaggcctttccttacacccgatatggttatctggtgggtaaggtgaaaaatataaatttagatgcaatagaagaccagaaactgggactcgtttttaatgtcattgtttctgttgaagagaatgatttgtcaaccgggaataagcacattccattaagctcgggtatggctgtcactgcagaaataaagactggaatgcgaagcgtaatcagctatcttcttagtcctctggaagagtctgtaacagaaagtttacatgagcgttaagtctcagagccgcggtatccggctcatatcttctcctg

SEQ ID NO: 791 - protein, 294 aa, Artificial Sequence
  Description of Artificial Sequence: Synthetic polypeptide
  anti CTLA-4 scFv
MEIVLTQSPGTLSLSPGERATLSCRASQSVGSSYLAWYQQKPGQAPRLLIYGAFSRATGIPDRFSGSGSGTDFTLTISRLEPEDFAVYYCQQYGSSPWTFGQGTKVEIKGGGSGGGSGGGSGGGQVQLVESGGGVVQPGRSLRLSCAASGFTFSSYTMHWVRQAPGKGLEWVTFISYDGNNKYYADSVKGRFTISRDNSKNTLYLQMNSLRAEDTAIYYCARTGWLGPFDYWGQGTLVTVSSLNPLINEISKIISAAGNFDVKEERAAASLLQLSGNASDFSYGRNSITLTASA

SEQ ID NO: 792 - DNA, 5309 bp, Artificial Sequence
  Description of Artificial Sequence: Synthetic polynucleotide
  anti CTLA-4 scFv
gaattcgttaagacccactttcacatttaagttgtttttctaatccgcatatgatcaattcaaggccgaataagaaggctggctctgcaccttggtgatcaaataattcgatagcttgtcgtaataatggcggcatactatcagtagtaggtgtttccctttcttctttagcgacttgatgctcttgatcttccaatacgcaacctaaagtaaaatgccccacagcgctgagtgcatataatgcattctctagtgaaaaaccttgttggcataaaaaggctaattgattttcgagagtttcatactgtttttctgtaggccgtgtacctaaatgtacttttgctccatcgcgatgacttagtaaagcacatctaaaacttttagcgttattacgtaaaaaatcttgccagctttccccttctaaagggcaaaagtgagtatggtgcctatctaacatctcaatggctaaggcgtcgagcaaagcccgcttattttttacatgccaatacaatgtaggctgctctacacctagcttctgggcgagtttacgggttgttaaaccttcgattccgacctcattaagcagctctaatgcgctgttaatcactttacttttatctaatctagacatcattaattcctaatttttgttgacactctatcatttatagagttaatttaccactccctatcagtgatagagaaaagtgaatcacaacgctgagagagagagaaatatggaaattgtactgacccagtcgcctggtaccctgtctctgtcgccgggtgaacgtgctaccctgtcttgtcgtgcttcgcaatcggttggctcgtcttatctggcatggtatcagcaaaaaccgggccaagcgcctcgtctgctgatttatggcgcgttttctcgtgctacgggcattcctgatcgtttttcgggctctggctctggtactgattttacgctgactatcagccgcttggaacctgaagattttgcggtttattattgccaacaatatggctcttctccgtggacgtttggtcaaggcactaaagttgaaattaaaggtggtggctcgggcggtggttctggtggtggtagtggtggtggtcaagtgcagttggttgaatcgggtggcggtgttgtgcagccgggccgttcgttgcgtctgtcttgcgcagcgagtggtttcaccttctcttcttatactatgcactgggtgcgtcaagcacctggcaaaggtctggagtgggtaacttttatttcatacgatggtaataataaatattatgcagattctgttaaaggtcgctttacgatttctcgcgataattcaaaaaatacgctgtatctgcagatgaattcgctgcgcgctgaggatactgcgatctactattgtgcgcgtactggttggctgggtccgtttgattactggggccaaggtacgctggttacagtttcgtcgcttaatccattaattaatgaaatcagcaaaatcatttcagctgcaggtaattttgatgttaaagaggaaagagctgcagcttctttattgcagttgtccggtaatgccagtgatttttcatatggacggaactcaataactttgacagcatcagcataatttattaatttaaataatagcaatcttactgggctgtgccacataagattgctatttttttggagtcataatggattcttgtcataaaattgattatgggttatacgccctggagattttagcccaataccataacgtctctgttaacccggaagaaattaaacatagatttgacacagacgggactggtctgggattaacgtcatggttgcttgctgcgaaatctttagaactaaaggtaaaacaggtaaaaaaaacaattgaccgattaaactttatttctttgcccgcattagtctggagagaggatggacgtcattttattctgactaaagtcagtaaagaagcaaacagatatcttatttttgatctggagcaacgaaatccccgtgttctcgaacagtctgagtttgaggcgttatatcaggggcatattattcttattgcttcccgttcttctgttaccgggaaactggcaaaatttgactttacctggtttatccctgccattataaaatacagaaaaatatttattgaaacccttgttgtatctgtttttttacaattatttgcattaataaccccccttttttttcaggtggttatggacaaagtattagtacacagggggttttcaacccttaatgttattactgtcgcattatctgttgtggtggtgtttgagattatactcagcggtttaagaacttacatttttgcacatagtacaagtcggattgatgttgagttgggtgccaaactcttccggcatttactggcgctaccgatctcttattttgagagtcgtcgtgttggtgatactgttgccagggtaagagaattagaccagatccgtaattttctgacaggacaggcattaacatctgttctggacttattattttcattcatattttttgcggtaatgtggtattacagcccaaagcttactctggtgatcttattttcgctgccctgttatgctgcatggtctgtttttattagccccattttgcgacgtcgccttgatgataagttttcacggaatgcggataatcaatctttcctggtggaatcagtcacggcgattaacactataaaagctatggcagtctcacctcagatgacgaacatatgggacaaacaattggcaggatatgttgctgcaggctttaaagtgacagtattagccaccattggtcaacaaggaatacagttaatacaaaagactgttatgatcatcaacctgtggttgggagcacacctggttatttccggggatttaagtattggtcagttaattgcttttaatatgcttgctggtcagattgttgcaccggttattcgccttgcacaaatctggcaggatttccagcaggttggtatatcagttacccgccttggtgatgtgcttaactctccaactgaaagttatcatgggaaactggcattaccggaaattaatggtaatatcacttttcgtaatatccggtttcgctataagcctgactctccggttattttagataatatcaatctcagtattaagcagggggaggttattggtattgtcggacgttctggttcaggaaaaagcacattaactaaattaattcaacgtttttatattcctgaaaatggccaggtcttaattgatggacatgatcttgcgttggccgatcctaactggttacgtcgtcaggtgggggttgtgttgcaggacaatgtgctgcttaatcgcagtattattgataatatctcactggctaatcctggtatgtccgtcgaaaaagttatttatgcagcgaaattagcaggcgctcatgattttatttctgaattgcgtgaggggtataacaccattgtcggggaacagggggcaggattatccggaggtcaacgtcaacgcatcgcaattgcaagggcgctggtgaacaaccctaaaatacttatttttgatgaagcaaccagtgctctggattatgagtcggagcatatcatcatgcgcaatatgcacaaaatatgtaagggcagaacggttataatcattgctcatcgtctgtctacagtaaaaaatgcagaccgcattattgtcatggaaaaagggaaaattgttgaacagggtaaacataaggaactgctttctgaaccggaaagtttatacagttacttatatcagttacagtcagactaacagaaagaacagaagaatatgaaaacatggttaatggggttcagcgagttcctgttgcgctataaacttgtctggagtgaaacatggaaaatccggaagcaattagatactccggtacgtgaaaaggacgaaaatgaattcttacccgctcatctggaattaattgaaacgccggtatccagacggccgcgtctggttgcttattttattatggggtttctggttattgctgtcattttatctgttttaggtcaggtggaaattgttgccactgcaaatgggaaattaacactaagtgggcgcagcaaagaaattaaacctattgaaaactcaatagttaaagaaattatcgtaaaagaaggagagtcagtccggaaaggggatgtgttattaaagcttacagcactgggagctgaagctgatacgttaaaaacacagtcatcactgttacagaccaggctggaacaaactcggtatcaaattctgagcaggtcaattgaattaaataaactacctgaactgaagcttcctgatgagccttattttcagaatgtatctgaagaggaagtactgcgtttaacttctttgataaaagaacagttttccacatggcaaaatcagaagtatcaaaaagaactgaatctggataagaaaagagcagagcgattaacaatacttgcccgtataaaccgttatgaaaatttatcgagagttgaaaaaagccgtctggatgatttcaggagtttattgcataaacaggcaattgcaaaacatgctgtacttgagcaggagaataaatatgtcgaggcagcaaatgaattacgggtttataaatcgcaactggagcaaattgagagtgagatattgtctgcaaaagaagaatatcagcttgtcacgcagctttttaaaaatgaaattttagacaagctaagacaaacaacagacaacattgagttattaactctggagttagagaaaaatgaagagcgtcaacaggcttcagtaatcagggcccctgtttcgggaaaagttcagcaactgaaggttcatactgaaggtggggttgttacaacagcggaaacactgatggtcatcgttccggaagatgacacgctggaggttactgctctggtacaaaataaagatattggttttattaacgtcgggcagaatgccatcattaaagtggaggcctttccttacacccgatatggttatctggtgggtaaggtgaaaaatataaatttagatgcaatagaagaccagaaactgggactcgtttttaatgtcattgtttctgttgaagagaatgatttgtcaaccgggaataagcacattccattaagctcgggtatggctgtcactgcagaaataaagactggaatgcgaagcgtaatcagctatcttcttagtcctctggaagagtctgtaacagaaagtttacatgagcgttaagtctcagagccgcggtatccggctcatatcttctcctg

SEQ ID NO: 793 - protein, 288 aa, Artificial Sequence
  Description of Artificial Sequence: Synthetic polypeptide
  anti PD-1 scFv
MQVQLVESGGGVVQPGRSLRLDCKASGITFSNSGMHWVRQAPGKGLEWVAVIWYDGSKRYYADSVKGRFTISRDNSKNTLFLQMNSLRAEDTAVYYCATNDDYWGQGTLVTVSSGGGSGGGSGGGSGGGEIVLTQSPATLSLSPGERATLSCRASQSVSSYLAWYQQKPGQAPRLLIYDASNRATGIPARFSGSGSGTDFTLTISSLEPEDFAVYYCQQSSNWPRTFGQGTKVEIKLNPLINEISKIISAAGNFDVKEERAAASLLQLSGNASDFSYGRNSITLTASA

SEQ ID NO: 794 - DNA, 5291 bp, Artificial Sequence
  Description of Artificial Sequence: Synthetic polynucleotide
  anti PD-1 scFv
gaattcgttaagacccactttcacatttaagttgtttttctaatccgcatatgatcaattcaaggccgaataagaaggctggctctgcaccttggtgatcaaataattcgatagcttgtcgtaataatggcggcatactatcagtagtaggtgtttccctttcttctttagcgacttgatgctcttgatcttccaatacgcaacctaaagtaaaatgccccacagcgctgagtgcatataatgcattctctagtgaaaaaccttgttggcataaaaaggctaattgattttcgagagtttcatactgtttttctgtaggccgtgtacctaaatgtacttttgctccatcgcgatgacttagtaaagcacatctaaaacttttagcgttattacgtaaaaaatcttgccagctttccccttctaaagggcaaaagtgagtatggtgcctatctaacatctcaatggctaaggcgtcgagcaaagcccgcttattttttacatgccaatacaatgtaggctgctctacacctagcttctgggcgagtttacgggttgttaaaccttcgattccgacctcattaagcagctctaatgcgctgttaatcactttacttttatctaatctagacatcattaattcctaatttttgttgacactctatcatttatagagttaatttaccactccctatcagtgatagagaaaagtgaagttaaattgaggaggaggcagttccatgcaagtacaactggttgaatccggcggaggagtggtgcaaccgggccgcagtttgcgtctggattgtaaagcttcaggcatcactttttctaattctggtatgcactgggttcgccaagctccgggtaaaggtctggagtgggttgcggtgatctggtatgatggttctaaacgatattatgcggatagtgttaagggtcgttttactatttctcgtgataattctaagaacaccttgtttctgcagatgaatagtctgcgcgctgaggatactgcggtatattattgtgcgactaatgacgattattggggccaaggcacgctggttaccgtgagctctggtggtggttcgggtggtggttctggtggtgggagcggcggtggcgagatcgttctgactcaaagcccggcgactctgagtctgagtccgggtgaacgtgcgactctgagctgccgtgcgtctcagagtgtgtcgagttatctggcgtggtaccaacaaaaaccgggccaggcgccgcgactgctgatttatgatgcttctaatcgtgcgactggtattccggcgcgctttagcggttctggctcaggcactgacttcactctgactatttcttcgctggaaccggaagattttgcggtgtactattgtcaacaatcatctaattggcctcgtacgttcggtcaaggtacaaaagtggagataaaacttaatccattaattaatgaaatcagcaaaatcatttcagctgcaggtaattttgatgttaaagaggaaagagctgcagcttctttattgcagttgtccggtaatgccagtgatttttcatatggacggaactcaataactttgacagcatcagcataatttattaatttaaataatagcaatcttactgggctgtgccacataagattgctatttttttggagtcataatggattcttgtcataaaattgattatgggttatacgccctggagattttagcccaataccataacgtctctgttaacccggaagaaattaaacatagatttgacacagacgggactggtctgggattaacgtcatggttgcttgctgcgaaatctttagaactaaaggtaaaacaggtaaaaaaaacaattgaccgattaaactttatttctttgcccgcattagtctggagagaggatggacgtcattttattctgactaaagtcagtaaagaagcaaacagatatcttatttttgatctggagcaacgaaatccccgtgttctcgaacagtctgagtttgaggcgttatatcaggggcatattattcttattgcttcccgttcttctgttaccgggaaactggcaaaatttgactttacctggtttatccctgccattataaaatacagaaaaatatttattgaaacccttgttgtatctgtttttttacaattatttgcattaataaccccccttttttttcaggtggttatggacaaagtattagtacacagggggttttcaacccttaatgttattactgtcgcattatctgttgtggtggtgtttgagattatactcagcggtttaagaacttacatttttgcacatagtacaagtcggattgatgttgagttgggtgccaaactcttccggcatttactggcgctaccgatctcttattttgagagtcgtcgtgttggtgatactgttgccagggtaagagaattagaccagatccgtaattttctgacaggacaggcattaacatctgttctggacttattattttcattcatattttttgcggtaatgtggtattacagcccaaagcttactctggtgatcttattttcgctgccctgttatgctgcatggtctgtttttattagccccattttgcgacgtcgccttgatgataagttttcacggaatgcggataatcaatctttcctggtggaatcagtcacggcgattaacactataaaagctatggcagtctcacctcagatgacgaacatatgggacaaacaattggcaggatatgttgctgcaggctttaaagtgacagtattagccaccattggtcaacaaggaatacagttaatacaaaagactgttatgatcatcaacctgtggttgggagcacacctggttatttccggggatttaagtattggtcagttaattgcttttaatatgcttgctggtcagattgttgcaccggttattcgccttgcacaaatctggcaggatttccagcaggttggtatatcagttacccgccttggtgatgtgcttaactctccaactgaaagttatcatgggaaactggcattaccggaaattaatggtaatatcacttttcgtaatatccggtttcgctataagcctgactctccggttattttagataatatcaatctcagtattaagcagggggaggttattggtattgtcggacgttctggttcaggaaaaagcacattaactaaattaattcaacgtttttatattcctgaaaatggccaggtcttaattgatggacatgatcttgcgttggccgatcctaactggttacgtcgtcaggtgggggttgtgttgcaggacaatgtgctgcttaatcgcagtattattgataatatctcactggctaatcctggtatgtccgtcgaaaaagttatttatgcagcgaaattagcaggcgctcatgattttatttctgaattgcgtgaggggtataacaccattgtcggggaacagggggcaggattatccggaggtcaacgtcaacgcatcgcaattgcaagggcgctggtgaacaaccctaaaatacttatttttgatgaagcaaccagtgctctggattatgagtcggagcatatcatcatgcgcaatatgcacaaaatatgtaagggcagaacggttataatcattgctcatcgtctgtctacagtaaaaaatgcagaccgcattattgtcatggaaaaagggaaaattgttgaacagggtaaacataaggaactgctttctgaaccggaaagtttatacagttacttatatcagttacagtcagactaacagaaagaacagaagaatatgaaaacatggttaatggggttcagcgagttcctgttgcgctataaacttgtctggagtgaaacatggaaaatccggaagcaattagatactccggtacgtgaaaaggacgaaaatgaattcttacccgctcatctggaattaattgaaacgccggtatccagacggccgcgtctggttgcttattttattatggggtttctggttattgctgtcattttatctgttttaggtcaggtggaaattgttgccactgcaaatgggaaattaacactaagtgggcgcagcaaagaaattaaacctattgaaaactcaatagttaaagaaattatcgtaaaagaaggagagtcagtccggaaaggggatgtgttattaaagcttacagcactgggagctgaagctgatacgttaaaaacacagtcatcactgttacagaccaggctggaacaaactcggtatcaaattctgagcaggtcaattgaattaaataaactacctgaactgaagcttcctgatgagccttattttcagaatgtatctgaagaggaagtactgcgtttaacttctttgataaaagaacagttttccacatggcaaaatcagaagtatcaaaaagaactgaatctggataagaaaagagcagagcgattaacaatacttgcccgtataaaccgttatgaaaatttatcgagagttgaaaaaagccgtctggatgatttcaggagtttattgcataaacaggcaattgcaaaacatgctgtacttgagcaggagaataaatatgtcgaggcagcaaatgaattacgggtttataaatcgcaactggagcaaattgagagtgagatattgtctgcaaaagaagaatatcagcttgtcacgcagctttttaaaaatgaaattttagacaagctaagacaaacaacagacaacattgagttattaactctggagttagagaaaaatgaagagcgtcaacaggcttcagtaatcagggcccctgtttcgggaaaagttcagcaactgaaggttcatactgaaggtggggttgttacaacagcggaaacactgatggtcatcgttccggaagatgacacgctggaggttactgctctggtacaaaataaagatattggttttattaacgtcgggcagaatgccatcattaaagtggaggcctttccttacacccgatatggttatctggtgggtaaggtgaaaaatataaatttagatgcaatagaagaccagaaactgggactcgtttttaatgtcattgtttctgttgaagagaatgatttgtcaaccgggaataagcacattccattaagctcgggtatggctgtcactgcagaaataaagactggaatgcgaagcgtaatcagctatcttcttagtcctctggaagagtctgtaacagaaagtttacatgagcgttaagtctcagagccgcggtatccggctcatatcttctcctg

SEQ ID NO: 795 - protein, 288 aa, Artificial Sequence
  Description of Artificial Sequence: Synthetic polypeptide
  anti PD-1 scFv
MEIVLTQSPATLSLSPGERATLSCRASQSVSSYLAWYQQKPGQAPRLLIYDASNRATGIPARFSGSGSGTDFTLTISSLEPEDFAVYYCQQSSNWPRTFGQGTKVEIKGGGSGGGSGGGSGGGQVQLVESGGGVVQPGRSLRLDCKASGITFSNSGMHWVRQAPGKGLEWVAVIWYDGSKRYYADSVKGRFTISRDNSKNTLFLQMNSLRAEDTAVYYCATNDDYWGQGTLVTVSSLNPLINEISKIISAAGNFDVKEERAAASLLQLSGNASDFSYGRNSITLTASA

SEQ ID NO: 796 - DNA, 5291 bp, Artificial Sequence
  Description of Artificial Sequence: Synthetic polynucleotide
  anti PD-1 scFv
gaattcgttaagacccactttcacatttaagttgtttttctaatccgcatatgatcaattcaaggccgaataagaaggctggctctgcaccttggtgatcaaataattcgatagcttgtcgtaataatggcggcatactatcagtagtaggtgtttccctttcttctttagcgacttgatgctcttgatcttccaatacgcaacctaaagtaaaatgccccacagcgctgagtgcatataatgcattctctagtgaaaaaccttgttggcataaaaaggctaattgattttcgagagtttcatactgtttttctgtaggccgtgtacctaaatgtacttttgctccatcgcgatgacttagtaaagcacatctaaaacttttagcgttattacgtaaaaaatcttgccagctttccccttctaaagggcaaaagtgagtatggtgcctatctaacatctcaatggctaaggcgtcgagcaaagcccgcttattttttacatgccaatacaatgtaggctgctctacacctagcttctgggcgagtttacgggttgttaaaccttcgattccgacctcattaagcagctctaatgcgctgttaatcactttacttttatctaatctagacatcattaattcctaatttttgttgacactctatcatttatagagttaatttaccactccctatcagtgatagagaaaagtgaatataccgaacgcttaaggaggctttatggaaatcgtgctgactcagagtccggcgactctgtctctgagtccgggcgaacgcgcgactctgtcttgccgtgcgtctcaatctgtgtcttcatacttggcttggtaccaacaaaaaccgggccaggcgccgcgactgttgatttatgatgcgtcgaatcgcgcgactggcattccggcgcgcttttcgggtagcggttctggtactgattttacgctgactatctcttctctggagcctgaagatttcgctgtttattactgccaacagtctagtaattggccgcgtactttcggccagggcactaaggtggaaattaaaggtggcggctcgggcggcggctcgggtggtggttctggtggtggccaagtgcaactggtggaaagtggcggcggggtggtgcaaccgggccgttctctgcgcctggattgtaaagcttcaggcattacttttagcaactctggtatgcactgggttcgccaagctccgggcaaaggcctggaatgggtggcggttatttggtacgatggctctaaacgttattacgctgacagtgttaaaggccgctttaccatttctcgtgataattctaaaaataccctgtttctgcaaatgaactcgctgcgcgcggaagatactgctgtttactattgtgcgactaatgatgattactggggtcaaggtaccctggttaccgtgtcttctcttaatccattaattaatgaaatcagcaaaatcatttcagctgcaggtaattttgatgttaaagaggaaagagctgcagcttctttattgcagttgtccggtaatgccagtgatttttcatatggacggaactcaataactttgacagcatcagcataatttattaatttaaataatagcaatcttactgggctgtgccacataagattgctatttttttggagtcataatggattcttgtcataaaattgattatgggttatacgccctggagattttagcccaataccataacgtctctgttaacccggaagaaattaaacatagatttgacacagacgggactggtctgggattaacgtcatggttgcttgctgcgaaatctttagaactaaaggtaaaacaggtaaaaaaaacaattgaccgattaaactttatttctttgcccgcattagtctggagagaggatggacgtcattttattctgactaaagtcagtaaagaagcaaacagatatcttatttttgatctggagcaacgaaatccccgtgttctcgaacagtctgagtttgaggcgttatatcaggggcatattattcttattgcttcccgttcttctgttaccgggaaactggcaaaatttgactttacctggtttatccctgccattataaaatacagaaaaatatttattgaaacccttgttgtatctgtttttttacaattatttgcattaataaccccccttttttttcaggtggttatggacaaagtattagtacacagggggttttcaacccttaatgttattactgtcgcattatctgttgtggtggtgtttgagattatactcagcggtttaagaacttacatttttgcacatagtacaagtcggattgatgttgagttgggtgccaaactcttccggcatttactggcgctaccgatctcttattttgagagtcgtcgtgttggtgatactgttgccagggtaagagaattagaccagatccgtaattttctgacaggacaggcattaacatctgttctggacttattattttcattcatattttttgcggtaatgtggtattacagcccaaagcttactctggtgatcttattttcgctgccctgttatgctgcatggtctgtttttattagccccattttgcgacgtcgccttgatgataagttttcacggaatgcggataatcaatctttcctggtggaatcagtcacggcgattaacactataaaagctatggcagtctcacctcagatgacgaacatatgggacaaacaattggcaggatatgttgctgcaggctttaaagtgacagtattagccaccattggtcaacaaggaatacagttaatacaaaagactgttatgatcatcaacctgtggttgggagcacacctggttatttccggggatttaagtattggtcagttaattgcttttaatatgcttgctggtcagattgttgcaccggttattcgccttgcacaaatctggcaggatttccagcaggttggtatatcagttacccgccttggtgatgtgcttaactctccaactgaaagttatcatgggaaactggcattaccggaaattaatggtaatatcacttttcgtaatatccggtttcgctataagcctgactctccggttattttagataatatcaatctcagtattaagcagggggaggttattggtattgtcggacgttctggttcaggaaaaagcacattaactaaattaattcaacgtttttatattcctgaaaatggccaggtcttaattgatggacatgatcttgcgttggccgatcctaactggttacgtcgtcaggtgggggttgtgttgcaggacaatgtgctgcttaatcgcagtattattgataatatctcactggctaatcctggtatgtccgtcgaaaaagttatttatgcagcgaaattagcaggcgctcatgattttatttctgaattgcgtgaggggtataacaccattgtcggggaacagggggcaggattatccggaggtcaacgtcaacgcatcgcaattgcaagggcgctggtgaacaaccctaaaatacttatttttgatgaagcaaccagtgctctggattatgagtcggagcatatcatcatgcgcaatatgcacaaaatatgtaagggcagaacggttataatcattgctcatcgtctgtctacagtaaaaaatgcagaccgcattattgtcatggaaaaagggaaaattgttgaacagggtaaacataaggaactgctttctgaaccggaaagtttatacagttacttatatcagttacagtcagactaacagaaagaacagaagaatatgaaaacatggttaatggggttcagcgagttcctgttgcgctataaacttgtctggagtgaaacatggaaaatccggaagcaattagatactccggtacgtgaaaaggacgaaaatgaattcttacccgctcatctggaattaattgaaacgccggtatccagacggccgcgtctggttgcttattttattatggggtttctggttattgctgtcattttatctgttttaggtcaggtggaaattgttgccactgcaaatgggaaattaacactaagtgggcgcagcaaagaaattaaacctattgaaaactcaatagttaaagaaattatcgtaaaagaaggagagtcagtccggaaaggggatgtgttattaaagcttacagcactgggagctgaagctgatacgttaaaaacacagtcatcactgttacagaccaggctggaacaaactcggtatcaaattctgagcaggtcaattgaattaaataaactacctgaactgaagcttcctgatgagccttattttcagaatgtatctgaagaggaagtactgcgtttaacttctttgataaaagaacagttttccacatggcaaaatcagaagtatcaaaaagaactgaatctggataagaaaagagcagagcgattaacaatacttgcccgtataaaccgttatgaaaatttatcgagagttgaaaaaagccgtctggatgatttcaggagtttattgcataaacaggcaattgcaaaacatgctgtacttgagcaggagaataaatatgtcgaggcagcaaatgaattacgggtttataaatcgcaactggagcaaattgagagtgagatattgtctgcaaaagaagaatatcagcttgtcacgcagctttttaaaaatgaaattttagacaagctaagacaaacaacagacaacattgagttattaactctggagttagagaaaaatgaagagcgtcaacaggcttcagtaatcagggcccctgtttcgggaaaagttcagcaactgaaggttcatactgaaggtggggttgttacaacagcggaaacactgatggtcatcgttccggaagatgacacgctggaggttactgctctggtacaaaataaagatattggttttattaacgtcgggcagaatgccatcattaaagtggaggcctttccttacacccgatatggttatctggtgggtaaggtgaaaaatataaatttagatgcaatagaagaccagaaactgggactcgtttttaatgtcattgtttctgttgaagagaatgatttgtcaaccgggaataagcacattccattaagctcgggtatggctgtcactgcagaaataaagactggaatgcgaagcgtaatcagctatcttcttagtcctctggaagagtctgtaacagaaagtttacatgagcgttaagtctcagagccgcggtatccggctcatatcttctcctg

SEQ ID NO: 797 - protein, 294 aa, Artificial Sequence
  Description of Artificial Sequence: Synthetic polypeptide
  anti PDL-1 scFv
MEVQLVESGGGLVQPGGSLRLSCAASGFTFSDSWIHWVRQAPGKGLEWVAWISPYGGSTYYADSVKGRFTISADTSKNTAYLQMNSLRAEDTAVYYCARRHWPGGFDYWGQGTLVTVSSGGGSGGGSGGGSGGGDIQMTQSPSSLSASVGDRVTITCRASQDVSTAVAWYQQKPGKAPKLLIYSASFLYSGVPSRFSGSGSGTDFTLTISSLQPEDFATYYCQQYLYHPATFGQGTKVEIKRLNPLINEISKIISAAGNFDVKEERAAASLLQLSGNASDFSYGRNSITLTASA

SEQ ID NO: 798 - DNA, 5309 bp, Artificial Sequence
  Description of Artificial Sequence: Synthetic polynucleotide
  anti PDL-1 scFv
gaattcgttaagacccactttcacatttaagttgtttttctaatccgcatatgatcaattcaaggccgaataagaaggctggctctgcaccttggtgatcaaataattcgatagcttgtcgtaataatggcggcatactatcagtagtaggtgtttccctttcttctttagcgacttgatgctcttgatcttccaatacgcaacctaaagtaaaatgccccacagcgctgagtgcatataatgcattctctagtgaaaaaccttgttggcataaaaaggctaattgattttcgagagtttcatactgtttttctgtaggccgtgtacctaaatgtacttttgctccatcgcgatgacttagtaaagcacatctaaaacttttagcgttattacgtaaaaaatcttgccagctttccccttctaaagggcaaaagtgagtatggtgcctatctaacatctcaatggctaaggcgtcgagcaaagcccgcttattttttacatgccaatacaatgtaggctgctctacacctagcttctgggcgagtttacgggttgttaaaccttcgattccgacctcattaagcagctctaatgcgctgttaatcactttacttttatctaatctagacatcattaattcctaatttttgttgacactctatcatttatagagttaatttaccactccctatcagtgatagagaaaagtgaagatagggaccaggtaaggaggatgaatggaagtgcagctggtggagtcaggtggaggcttggtgcaaccgggcggttcactgcgtctgtcatgtgcggcgtctgggtttacttttagtgactcttggattcactgggtgcgccaggctccgggtaaaggcctggaatgggtagcttggattagtccttacggtggctcgacctattatgctgattcggtaaagggtcgctttactattagcgctgatacttctaaaaatactgcatacctgcagatgaatagcctgcgcgctgaggatactgctgtgtattattgcgcgcgtcgccactggccgggcggctttgattattggggccaaggtactctggttaccgtgtctagtggcggtggtagcggcggcggctcaggtggcggctcgggcggtggcgacattcagatgactcagtctccgtcttctttgtcggcgagcgtgggcgatcgtgttaccatcacgtgtcgcgcgagccaagatgtgtcgactgcggtggcttggtatcaacaaaaaccgggtaaagctccgaaactgctgatttatagtgcgtcttttttgtattctggtgttccgtctcgtttctctggctcaggtagcggtactgattttacgctgactatttcttcactgcaaccggaagattttgctacgtattattgtcaacaatatctgtatcacccggcgacgtttggtcagggtactaaggtggagataaaacgccttaatccattaattaatgaaatcagcaaaatcatttcagctgcaggtaattttgatgttaaagaggaaagagctgcagcttctttattgcagttgtccggtaatgccagtgatttttcatatggacggaactcaataactttgacagcatcagcataatttattaatttaaataatagcaatcttactgggctgtgccacataagattgctatttttttggagtcataatggattcttgtcataaaattgattatgggttatacgccctggagattttagcccaataccataacgtctctgttaacccggaagaaattaaacatagatttgacacagacgggactggtctgggattaacgtcatggttgcttgctgcgaaatctttagaactaaaggtaaaacaggtaaaaaaaacaattgaccgattaaactttatttctttgcccgcattagtctggagagaggatggacgtcattttattctgactaaagtcagtaaagaagcaaacagatatcttatttttgatctggagcaacgaaatccccgtgttctcgaacagtctgagtttgaggcgttatatcaggggcatattattcttattgcttcccgttcttctgttaccgggaaactggcaaaatttgactttacctggtttatccctgccattataaaatacagaaaaatatttattgaaacccttgttgtatctgtttttttacaattatttgcattaataaccccccttttttttcaggtggttatggacaaagtattagtacacagggggttttcaacccttaatgttattactgtcgcattatctgttgtggtggtgtttgagattatactcagcggtttaagaacttacatttttgcacatagtacaagtcggattgatgttgagttgggtgccaaactcttccggcatttactggcgctaccgatctcttattttgagagtcgtcgtgttggtgatactgttgccagggtaagagaattagaccagatccgtaattttctgacaggacaggcattaacatctgttctggacttattattttcattcatattttttgcggtaatgtggtattacagcccaaagcttactctggtgatcttattttcgctgccctgttatgctgcatggtctgtttttattagccccattttgcgacgtcgccttgatgataagttttcacggaatgcggataatcaatctttcctggtggaatcagtcacggcgattaacactataaaagctatggcagtctcacctcagatgacgaacatatgggacaaacaattggcaggatatgttgctgcaggctttaaagtgacagtattagccaccattggtcaacaaggaatacagttaatacaaaagactgttatgatcatcaacctgtggttgggagcacacctggttatttccggggatttaagtattggtcagttaattgcttttaatatgcttgctggtcagattgttgcaccggttattcgccttgcacaaatctggcaggatttccagcaggttggtatatcagttacccgccttggtgatgtgcttaactctccaactgaaagttatcatgggaaactggcattaccggaaattaatggtaatatcacttttcgtaatatccggtttcgctataagcctgactctccggttattttagataatatcaatctcagtattaagcagggggaggttattggtattgtcggacgttctggttcaggaaaaagcacattaactaaattaattcaacgtttttatattcctgaaaatggccaggtcttaattgatggacatgatcttgcgttggccgatcctaactggttacgtcgtcaggtgggggttgtgttgcaggacaatgtgctgcttaatcgcagtattattgataatatctcactggctaatcctggtatgtccgtcgaaaaagttatttatgcagcgaaattagcaggcgctcatgattttatttctgaattgcgtgaggggtataacaccattgtcggggaacagggggcaggattatccggaggtcaacgtcaacgcatcgcaattgcaagggcgctggtgaacaaccctaaaatacttatttttgatgaagcaaccagtgctctggattatgagtcggagcatatcatcatgcgcaatatgcacaaaatatgtaagggcagaacggttataatcattgctcatcgtctgtctacagtaaaaaatgcagaccgcattattgtcatggaaaaagggaaaattgttgaacagggtaaacataaggaactgctttctgaaccggaaagtttatacagttacttatatcagttacagtcagactaacagaaagaacagaagaatatgaaaacatggttaatggggttcagcgagttcctgttgcgctataaacttgtctggagtgaaacatggaaaatccggaagcaattagatactccggtacgtgaaaaggacgaaaatgaattcttacccgctcatctggaattaattgaaacgccggtatccagacggccgcgtctggttgcttattttattatggggtttctggttattgctgtcattttatctgttttaggtcaggtggaaattgttgccactgcaaatgggaaattaacactaagtgggcgcagcaaagaaattaaacctattgaaaactcaatagttaaagaaattatcgtaaaagaaggagagtcagtccggaaaggggatgtgttattaaagcttacagcactgggagctgaagctgatacgttaaaaacacagtcatcactgttacagaccaggctggaacaaactcggtatcaaattctgagcaggtcaattgaattaaataaactacctgaactgaagcttcctgatgagccttattttcagaatgtatctgaagaggaagtactgcgtttaacttctttgataaaagaacagttttccacatggcaaaatcagaagtatcaaaaagaactgaatctggataagaaaagagcagagcgattaacaatacttgcccgtataaaccgttatgaaaatttatcgagagttgaaaaaagccgtctggatgatttcaggagtttattgcataaacaggcaattgcaaaacatgctgtacttgagcaggagaataaatatgtcgaggcagcaaatgaattacgggtttataaatcgcaactggagcaaattgagagtgagatattgtctgcaaaagaagaatatcagcttgtcacgcagctttttaaaaatgaaattttagacaagctaagacaaacaacagacaacattgagttattaactctggagttagagaaaaatgaagagcgtcaacaggcttcagtaatcagggcccctgtttcgggaaaagttcagcaactgaaggttcatactgaaggtggggttgttacaacagcggaaacactgatggtcatcgttccggaagatgacacgctggaggttactgctctggtacaaaataaagatattggttttattaacgtcgggcagaatgccatcattaaagtggaggcctttccttacacccgatatggttatctggtgggtaaggtgaaaaatataaatttagatgcaatagaagaccagaaactgggactcgtttttaatgtcattgtttctgttgaagagaatgatttgtcaaccgggaataagcacattccattaagctcgggtatggctgtcactgcagaaataaagactggaatgcgaagcgtaatcagctatcttcttagtcctctggaagagtctgtaacagaaagtttacatgagcgttaagtctcagagccgcggtatccggctcatatcttctcctg

SEQ ID NO: 799 - protein, 294 aa, Artificial Sequence
  Description of Artificial Sequence: Synthetic polypeptide
  anti PDL-1 scFv
MDIQMTQSPSSLSASVGDRVTITCRASQDVSTAVAWYQQKPGKAPKLLIYSASFLYSGVPSRFSGSGSGTDFTLTISSLQPEDFATYYCQQYLYHPATFGQGTKVEIKRGGGSGGGSGGGSGGGEVQLVESGGGLVQPGGSLRLSCAASGFTFSDSWIHWVRQAPGKGLEWVAWISPYGGSTYYADSVKGRFTISADTSKNTAYLQMNSLRAEDTAVYYCARRHWPGGFDYWGQGTLVTVSSLNPLINEISKIISAAGNFDVKEERAAASLLQLSGNASDFSYGRNSITLTASA

SEQ ID NO: 800 - DNA, 5309 bp, Artificial Sequence
  Description of Artificial Sequence: Synthetic polynucleotide
  anti PDL-1 scFv
gaattcgttaagacccactttcacatttaagttgtttttctaatccgcatatgatcaattcaaggccgaataagaaggctggctctgcaccttggtgatcaaataattcgatagcttgtcgtaataatggcggcatactatcagtagtaggtgtttccctttcttctttagcgacttgatgctcttgatcttccaatacgcaacctaaagtaaaatgccccacagcgctgagtgcatataatgcattctctagtgaaaaaccttgttggcataaaaaggctaattgattttcgagagtttcatactgtttttctgtaggccgtgtacctaaatgtacttttgctccatcgcgatgacttagtaaagcacatctaaaacttttagcgttattacgtaaaaaatcttgccagctttccccttctaaagggcaaaagtgagtatggtgcctatctaacatctcaatggctaaggcgtcgagcaaagcccgcttattttttacatgccaatacaatgtaggctgctctacacctagcttctgggcgagtttacgggttgttaaaccttcgattccgacctcattaagcagctctaatgcgctgttaatcactttacttttatctaatctagacatcattaattcctaatttttgttgacactctatcatttatagagttaatttaccactccctatcagtgatagagaaaagtgaaataaatcccttcatgaggaggtaagatggatattcaaatgactcaatctccgagctctctgagtgcgtctgtgggtgatcgtgtgactattacttgtcgtgcgtctcaagatgtttcaactgcggttgcgtggtatcaacagaaaccgggcaaggcgcctaagctgctgatttattctgcttcgttcctgtacagcggtgtgccgtctcgtttctctggctctggttcgggtactgatttcactctgactatttcgagtctgcagccggaagattttgcgacttattattgtcaacaatatctgtatcaccctgcgacgtttggtcaaggcacgaaagttgaaattaaacgtggtggtggctctggtggtggcagcggtggtgggtcgggtggcggtgaagttcaactggttgagtcaggtggtggcctggtgcaaccgggcggctctctgcgcctgtcttgtgctgcgtcgggttttacgttctctgatagctggattcactgggtacgccaggcaccgggcaaaggtctggaatgggtagcttggatttcaccttatggtggctctacttattacgcggatagcgtgaaaggtcgctttactatttctgcggacactagcaaaaatactgcttacctgcaaatgaattcgctgcgtgctgaggatactgcagtgtattactgtgcgcgtcgtcattggcctggcggctttgattattggggtcaaggtactctggttactgttagcagccttaatccattaattaatgaaatcagcaaaatcatttcagctgcaggtaattttgatgttaaagaggaaagagctgcagcttctttattgcagttgtccggtaatgccagtgatttttcatatggacggaactcaataactttgacagcatcagcataatttattaatttaaataatagcaatcttactgggctgtgccacataagattgctatttttttggagtcataatggattcttgtcataaaattgattatgggttatacgccctggagattttagcccaataccataacgtctctgttaacccggaagaaattaaacatagatttgacacagacgggactggtctgggattaacgtcatggttgcttgctgcgaaatctttagaactaaaggtaaaacaggtaaaaaaaacaattgaccgattaaactttatttctttgcccgcattagtctggagagaggatggacgtcattttattctgactaaagtcagtaaagaagcaaacagatatcttatttttgatctggagcaacgaaatccccgtgttctcgaacagtctgagtttgaggcgttatatcaggggcatattattcttattgcttcccgttcttctgttaccgggaaactggcaaaatttgactttacctggtttatccctgccattataaaatacagaaaaatatttattgaaacccttgttgtatctgtttttttacaattatttgcattaataaccccccttttttttcaggtggttatggacaaagtattagtacacagggggttttcaacccttaatgttattactgtcgcattatctgttgtggtggtgtttgagattatactcagcggtttaagaacttacatttttgcacatagtacaagtcggattgatgttgagttgggtgccaaactcttccggcatttactggcgctaccgatctcttattttgagagtcgtcgtgttggtgatactgttgccagggtaagagaattagaccagatccgtaattttctgacaggacaggcattaacatctgttctggacttattattttcattcatattttttgcggtaatgtggtattacagcccaaagcttactctggtgatcttattttcgctgccctgttatgctgcatggtctgtttttattagccccattttgcgacgtcgccttgatgataagttttcacggaatgcggataatcaatctttcctggtggaatcagtcacggcgattaacactataaaagctatggcagtctcacctcagatgacgaacatatgggacaaacaattggcaggatatgttgctgcaggctttaaagtgacagtattagccaccattggtcaacaaggaatacagttaatacaaaagactgttatgatcatcaacctgtggttgggagcacacctggttatttccggggatttaagtattggtcagttaattgcttttaatatgcttgctggtcagattgttgcaccggttattcgccttgcacaaatctggcaggatttccagcaggttggtatatcagttacccgccttggtgatgtgcttaactctccaactgaaagttatcatgggaaactggcattaccggaaattaatggtaatatcacttttcgtaatatccggtttcgctataagcctgactctccggttattttagataatatcaatctcagtattaagcagggggaggttattggtattgtcggacgttctggttcaggaaaaagcacattaactaaattaattcaacgtttttatattcctgaaaatggccaggtcttaattgatggacatgatcttgcgttggccgatcctaactggttacgtcgtcaggtgggggttgtgttgcaggacaatgtgctgcttaatcgcagtattattgataatatctcactggctaatcctggtatgtccgtcgaaaaagttatttatgcagcgaaattagcaggcgctcatgattttatttctgaattgcgtgaggggtataacaccattgtcggggaacagggggcaggattatccggaggtcaacgtcaacgcatcgcaattgcaagggcgctggtgaacaaccctaaaatacttatttttgatgaagcaaccagtgctctggattatgagtcggagcatatcatcatgcgcaatatgcacaaaatatgtaagggcagaacggttataatcattgctcatcgtctgtctacagtaaaaaatgcagaccgcattattgtcatggaaaaagggaaaattgttgaacagggtaaacataaggaactgctttctgaaccggaaagtttatacagttacttatatcagttacagtcagactaacagaaagaacagaagaatatgaaaacatggttaatggggttcagcgagttcctgttgcgctataaacttgtctggagtgaaacatggaaaatccggaagcaattagatactccggtacgtgaaaaggacgaaaatgaattcttacccgctcatctggaattaattgaaacgccggtatccagacggccgcgtctggttgcttattttattatggggtttctggttattgctgtcattttatctgttttaggtcaggtggaaattgttgccactgcaaatgggaaattaacactaagtgggcgcagcaaagaaattaaacctattgaaaactcaatagttaaagaaattatcgtaaaagaaggagagtcagtccggaaaggggatgtgttattaaagcttacagcactgggagctgaagctgatacgttaaaaacacagtcatcactgttacagaccaggctggaacaaactcggtatcaaattctgagcaggtcaattgaattaaataaactacctgaactgaagcttcctgatgagccttattttcagaatgtatctgaagaggaagtactgcgtttaacttctttgataaaagaacagttttccacatggcaaaatcagaagtatcaaaaagaactgaatctggataagaaaagagcagagcgattaacaatacttgcccgtataaaccgttatgaaaatttatcgagagttgaaaaaagccgtctggatgatttcaggagtttattgcataaacaggcaattgcaaaacatgctgtacttgagcaggagaataaatatgtcgaggcagcaaatgaattacgggtttataaatcgcaactggagcaaattgagagtgagatattgtctgcaaaagaagaatatcagcttgtcacgcagctttttaaaaatgaaattttagacaagctaagacaaacaacagacaacattgagttattaactctggagttagagaaaaatgaagagcgtcaacaggcttcagtaatcagggcccctgtttcgggaaaagttcagcaactgaaggttcatactgaaggtggggttgttacaacagcggaaacactgatggtcatcgttccggaagatgacacgctggaggttactgctctggtacaaaataaagatattggttttattaacgtcgggcagaatgccatcattaaagtggaggcctttccttacacccgatatggttatctggtgggtaaggtgaaaaatataaatttagatgcaatagaagaccagaaactgggactcgtttttaatgtcattgtttctgttgaagagaatgatttgtcaaccgggaataagcacattccattaagctcgggtatggctgtcactgcagaaataaagactggaatgcgaagcgtaatcagctatcttcttagtcctctggaagagtctgtaacagaaagtttacatgagcgttaagtctcagagccgcggtatccggctcatatcttctcctg

SEQ ID NO: 801 - DNA, 104 bp, Artificial Sequence
  Description of Artificial Sequence: Synthetic polynucleotide
  fliC promoter
agcgggaataaggggcagagaaaagagtatttcgtcgactaacaaaaaatggctgtttgtgaaaaaaattctaaaggttgttttacgacagacgataacagggt

SEQ ID NO: 802 - DNA, 45 bp, Artificial Sequence
  Description of Artificial Sequence: Synthetic oligonucleotide
  fliC 5 untranslated region
tgacggcgattgagccgacgggtggaaacccaaaacgtaatcaac

SEQ ID NO: 803 - DNA, 96 bp, Artificial Sequence
  Description of Artificial Sequence: Synthetic oligonucleotide
  Tetracycline responsive promoter
atctaatctagacatcattaattcctaatttttgttgacactctatcattgatagagttattttaccactccctatcagtgatagagaaaagtgaa

SEQ ID NO: 804 - DNA, 705 bp, Artificial Sequence
  Description of Artificial Sequence: Synthetic polynucleotide
  Tetracycline responsive promoter
gaattcgttaagacccactttcacatttaagttgtttttctaatccgcatatgatcaattcaaggccgaataagaaggctggctctgcaccttggtgatcaaataattcgatagcttgtcgtaataatggcggcatactatcagtagtaggtgtttccctttcttctttagcgacttgatgctcttgatcttccaatacgcaacctaaagtaaaatgccccacagcgctgagtgcatataatgcattctctagtgaaaaaccttgttggcataaaaaggctaattgattttcgagagtttcatactgtttttctgtaggccgtgtacctaaatgtacttttgctccatcgcgatgacttagtaaagcacatctaaaacttttagcgttattacgtaaaaaatcttgccagctttccccttctaaagggcaaaagtgagtatggtgcctatctaacatctcaatggctaaggcgtcgagcaaagcccgcttattttttacatgccaatacaatgtaggctgctctacacctagcttctgggcgagtttacgggttgttaaaccttcgattccgacctcattaagcagctctaatgcgctgttaatcactttacttttatctaatctagacatcattaattcctaatttttgttgacactctatcatttatagagttaatttaccactccctatcagtgatagagaa

SEQ ID NO: 805 - DNA, 25 bp, Artificial Sequence
  Description of Artificial Sequence: Synthetic oligonucleotide
  Optimized ribosome binding site
aaataaaaatgaggaggcaattcta

SEQ ID NO: 806 - DNA, 25 bp, Artificial Sequence
  Description of Artificial Sequence: Synthetic oligonucleotide
  Optimized ribosome binding site
agattataaggagttaaatagaaaa

SEQ ID NO: 807 - DNA, 35 bp, Artificial Sequence
  Description of Artificial Sequence: Synthetic oligonucleotide
  Optimized ribosome binding site
ctcaaagaattataggaaaggaggaagcgataagt

SEQ ID NO: 808 - DNA, 25 bp, Artificial Sequence
  Description of Artificial Sequence: Synthetic oligonucleotide
  Optimized ribosome binding site
atcaccaatttgaggaaaggtaaat

SEQ ID NO: 809 - DNA, 25 bp, Artificial Sequence
  Description of Artificial Sequence: Synthetic oligonucleotide
  Optimized ribosome binding site
tggcagacgcctaaggaggaagacc

SEQ ID NO: 810 - DNA, 25 bp, Artificial Sequence
  Description of Artificial Sequence: Synthetic oligonucleotide
  Optimized ribosome binding site
tacataattttggggagggtactcg

SEQ ID NO: 811 - DNA, 25 bp, Artificial Sequence
  Description of Artificial Sequence: Synthetic oligonucleotide
  Optimized ribosome binding site
ttaaatatcaactagaggtcaccaa

SEQ ID NO: 812 - DNA, 25 bp, Artificial Sequence
  Description of Artificial Sequence: Synthetic oligonucleotide
  Optimized ribosome binding site
tacgatttaattcggaggttttttg

SEQ ID NO: 813 - DNA, 25 bp, Artificial Sequence
  Description of Artificial Sequence: Synthetic oligonucleotide
  Optimized ribosome binding site
tcacaacgctgagagagagagaaat

SEQ ID NO: 814 - DNA, 25 bp, Artificial Sequence
  Description of Artificial Sequence: Synthetic oligonucleotide
  Optimized ribosome binding site
gttaaattgaggaggaggcagttcc

SEQ ID NO: 815 - DNA, 25 bp, Artificial Sequence
  Description of Artificial Sequence: Synthetic oligonucleotide
  Optimized ribosome binding site
tataccgaacgcttaaggaggcttt

SEQ ID NO: 816 - DNA, 25 bp, Artificial Sequence
  Description of Artificial Sequence: Synthetic oligonucleotide
  Optimized ribosome binding site
ataaatcccttcatgaggaggtaag

SEQ ID NO: 817 - DNA, 25 bp, Artificial Sequence
  Description of Artificial Sequence: Synthetic oligonucleotide
  Optimized ribosome binding site
gatagggaccaggtaaggaggatga

SEQ ID NO: 818 - DNA, 200 bp, Artificial Sequence
  Description of Artificial Sequence: Synthetic polynucleotide
  Terminator sequence
tcgccgtaacctgattaactgagactgacggcaacgccaaattgcctgatgcgctgcgcttatcaggcctacaaggggaattgcaatttattgaatttgcacatttttgtaggccggataaggcgtttacgccgcatccggcaacatgaatggtaatttgccagcaacgtgcttccccgccaacggcggggttttttctg

SEQ ID NO: 819 - DNA, 96 bp, Artificial Sequence
  Description of Artificial Sequence: Synthetic oligonucleotide
  Terminator sequence
ctctaacggacttgagtgaggttgtaaagggagttggctcctcggtaccaaattccagaaaagaggcctcccgaaaggggggccttttttcgtttt

SEQ ID NO: 820 - DNA, 38 bp, Artificial Sequence
  Description of Artificial Sequence: Synthetic oligonucleotide
  Terminator sequence
gtctcagagccgcggtatccggctcatatcttctcctg

SEQ ID NO: 821 - DNA, 177 bp, Artificial Sequence
  Description of Artificial Sequence: Synthetic polynucleotide
  N terminal secretion tag for Type V auto-secreter secretion
atgaacaaagtatatagcctgaaatattgcccagtaactgggggtctgattgtagtcagtgaactggcatcccgcgtcatcaaaaaaacctgccgtcgtctgactcacatcctgctggcgggtattccggctgtgtatctgtactacccgcagatctcccaggcaggtatcgtccgc

SEQ ID NO: 822 - DNA, 921 bp, Artificial Sequence
  Description of Artificial Sequence: Synthetic polynucleotide
  C terminal secretion tag for Type V auto-secreter secretion
ttcaaagcggaggctgacaaggccgctgcagcaaaagctgactcctttatgaacgcgggttacaaaaacttcatgaccgaggtaaataatctcaataaacgtatgggtgatctgcgcgacactaatggggatgcaggcgcatgggcacgcattatgtctggtgcaggttcggcggatggcgggtattctgacaattacactcatgttcaggtgggcttcgataaaaaacatgagctggacggtgtggatctgttcactggcgtaaccatgacttatactgattcaagcgcagacagccacgcattttcaggtaaaacgaaatcagttggcggcggtctgtatgcgagcgcactgttcgagagcggcgcctacattgatctaattggcaagtatattcaccatgataatgattacacagggaactttgcaggcctgggcaccaaacactataacacgcattcatggtacgctggcgcagaaaccggctatagataccacctgaccgaggaaacctttatcgaaccgcaagcggaactggtttacggtgcggtcagtggcaagacctttcgttggaaagatggtgatatggatctgtcaatgaaaaaccgcgacttcagccccttgatcggccgcaccggcattgagctgggcaaaaccttctctggcaaagattggtctgttaccgcgcgtgcgggcacttcgtggcaatttgatctgctaaacaacggtgagactgtactgcgtgatgcgagtggcgaaaaacgtattaaaggtgaaaaagatagtagaatgctattcaacgtgggcatgaatgcgcagatcaaagataacatgcgttttgggttggagtttgaaaaatccgcgttcggtaaatataatgttgacaatgctgtgaacgcgaatttccgctacatgttttaa

SEQ ID NO: 823 - DNA, 729 bp, Artificial Sequence
  Description of Artificial Sequence: Synthetic polynucleotide
  Anti-CTLA-4 single chain antibody coding region (Heavy Chain linker Light Chain)
atgcaagtgcaactggtagagtccggtgggggcgtggtgcagccgggtcgcagcctgcgtctgtcgtgcgcggcgagtggttttacgttttcgagttatactatgcactgggttcgtcaagcgccgggcaaaggcctggaatgggttactttcatttcttacgatggtaataataaatattatgcggattctgtgaaaggtcgctttactatttcgcgcgataacagtaaaaacactctgtatctgcaaatgaattctctgcgtgcagaggatactgctatctattactgcgcgcgtacgggctggttgggcccgtttgattattggggccaaggcactttggttactgtgtcatcgggcgggggctctggcggtggttcaggtggtggcagtggtggtggcgagatcgtgttgactcaatctccgggtactctgtctctgtctccgggtgaacgcgcgaccctgtcttgccgcgcttctcagagtgttggttcatcgtatctggcatggtatcaacagaaaccgggtcaagcgccgcgtctgctgatttacggtgcttttagtcgcgcaaccgggattccggatcgattttctggttcaggttctggcactgactttactttgactattagtcgtctggaaccggaggacttcgcggtttattattgccaacagtatggttcttctccgtggacctttggtcaaggcactaaagttgaaattaaataa

SEQ ID NO: 824 - DNA, 729 bp, Artificial Sequence
  Description of Artificial Sequence: Synthetic polynucleotide
  Anti-CTLA-4 single chain antibody coding region (Light Chain linker Heavy Chain)
atggagattgtactgacccagagccctggtacattgtctttgtcgcctggtgaacgcgcgactctgtcttgtcgtgcgtctcagtctgttggtagttcgtatctggcgtggtatcaacaaaaaccgggccaagctccgcgtctgctgatttacggtgcatttagccgcgcgactggcattccggaccgcttttctgggtctggctcaggtaccgattttactctgactatttcgcgtctggagccggaggatttcgcggtttattactgccagcaatatggttctagtccgtggaccttcggccaaggtactaaagtggaaatcaaaggcgggggttcgggtggtggctctgggggtggctcgggcggtgggcaggtgcaactggttgagagtggtggcggcgttgttcaaccgggccgctctctgcgcctgtcgtgcgctgcttctggctttacctttagctcttatacgatgcactgggttcgccaagctccgggtaaaggtctggagtgggtgactttcatttcttacgatggtaacaacaaatattatgctgattctgttaaaggccgttttactatttctcgagacaatagcaaaaacactctgtacctgcagatgaattctctgcgcgctgaagacaccgcgatttattattgtgcgcgcactggttggctgggtccgtttgattattggggtcagggcacgctggttactgttagctcgtga

SEQ ID NO: 825 - DNA, 711 bp, Artificial Sequence
  Description of Artificial Sequence: Synthetic polynucleotide
  Anti-PD-1 single chain antibody coding region (Heavy Chain linker Light Chain)
atgcaggtgcaattggtggagtcgggtggcggcgtggtgcaaccgggtcgtagcctgcgcctggattgtaaagcgtcaggcatcacgtttagcaattctggcatgcactgggtgcgtcaagcgccgggcaaaggtctggagtgggttgcggtaatttggtacgatggttctaaacgctattacgcggatagtgtgaaaggtcgctttactatctctcgcgataattctaaaaacaccctgtttctgcaaatgaattcgttgcgtgcggaagatactgcggtatattattgtgctactaacgatgattattggggtcaaggcaccctggtgactgtttcgagcggcggtggtagcggcggcggctctggtggtggttctggtggcggtgagattgtgctgactcaaagcccggcgaccctgtctctgtcgccgggtgaacgcgctactctgagttgccgtgcgtcgcaaagcgtgtcttcttatctggcgtggtaccaacaaaaaccgggtcaagcgccgcgcctgctgatatatgatgctagtaatcgtgcaacgggtattccggcacgcttttcaggttctggcagcggcaccgatttcactctgactatctcgtcactggagccggaagactttgcggtttattattgtcagcaatcttctaattggccgcgtacgtttggtcagggcactaaagttgaaatcaaataa

SEQ ID NO: 826 - DNA, 711 bp, Artificial Sequence
  Description of Artificial Sequence: Synthetic polynucleotide
  Anti-PD-1 single chain antibody coding region (Light Chain linker Heavy Chain)
atggaaatcgttttaacgcagtcgccggcgactctgtctttgtcgcctggtgaacgtgctacgctgtcttgccgcgcgtcacagtctgtgtcgtcatatctggcttggtaccaacagaaaccgggccaagctccgcgcctgctgatttatgatgcgtctaatcgcgcgaccggcattccggcgcgtttttctggctccggctctggcaccgactttactctgactatttcgtctctggaaccggaagattttgcggtgtactattgccagcaatcttctaattggccgcgcacgtttggtcaaggtaccaaggttgagatcaaaggtggtggctcgggcggcggttcgggcggcggctcaggtggtggccaagttcagttggttgagtctggcgggggcgtagtacaaccgggtcgttctttgcgtctggattgcaaagcgagcggtattacctttagcaattcaggtatgcactgggtgcgccaagcgccgggcaaaggcctggaatgggttgcggtgatttggtacgatggctcgaaacgttattatgctgacagcgttaaaggtcgttttactattagccgtgataattccaaaaatacgctgtttctgcagatgaatagcctgcgtgctgaagacactgcggtttattactgtgctactaatgatgattactggggccagggcaccctggtgactgtgagttcttaa

SEQ ID NO: 827 - DNA, 729 bp, Artificial Sequence
  Description of Artificial Sequence: Synthetic polynucleotide
  Anti-PD-L1 single chain antibody coding region (Light Chain linker Heavy Chain)
atggatattcagatgactcagagccctagctcactgtctgcgtcagttggcgatcgtgtgactattacctgtcgcgctagtcaggatgtgtctacggcggttgcgtggtatcaacagaaaccgggcaaagctccgaaactgttgatttattcagcgtctttcctgtattcgggtgtgccttctcgcttttcgggctctggtagcggtactgattttacgctgactattagttcactgcaaccggaggactttgcgacttattattgccaacaatacctgtatcacccggcgacctttggtcaaggcactaaagtggaaattaaacgcggcggcggcagcggtggcggctctggtggtgggtctggtggtggtgaggttcagctggttgagtctggtggtggtctggttcaacctgggggcagcctgcgcctgtcgtgcgcggcgtctggttttacgttctcagattcttggattcactgggtacgtcaagctccgggcaaaggtctggagtgggtggcgtggatttctccgtatggcggttcgacgtattacgcggactctgttaaagggcgttttacgatctcagcggatacttctaaaaatactgcgtatctgcaaatgaattctctgcgagcggaggataccgcggtgtattactgtgctcgccgccactggcctggtggtttcgattattggggtcaaggtaccctggtgactgtttcgtcttaa

SEQ ID NO: 828 - DNA, 729 bp, Artificial Sequence
  Description of Artificial Sequence: Synthetic polynucleotide
  Anti-PD-L1 single chain antibody coding region (Heavy Chain linker Light Chain)
atggaagttcagctggtggagagtggtggcggtctggtgcagccgggcggctctctgcgtctgagctgtgcggcgtctggctttacgttttctgacagttggattcactgggtgcgccaagcaccgggcaaaggcctggagtgggtggcgtggatttctccgtatggcggtagtacttattatgctgattctgtgaaaggccgttttaccatttcggcggacacttcaaaaaataccgcgtatctgcaaatgaatagcctgcgcgctgaagacacggctgtttactactgtgctcgccgccactggccgggcggtttcgattattggggccaaggcactctggtgactgtgagctctggcggcgggtcgggtggcggttctggcggtggcagtggcggtggtgatattcaaatgacccaatctccgtcgtctctgagcgcgtctgtgggcgatcgtgtaaccattacttgtcgtgcgtcgcaggatgtgtctactgctgtggcgtggtatcagcaaaaaccgggtaaagctccgaaactgctgatttatagcgcttcttttctgtatagtggtgttccgtcacgttttagcggttcaggctctggtactgatttcacactgactatttcttctctgcaaccggaagatttcgcgacttattattgtcagcagtacttgtaccacccggcaacttttggtcagggcactaaagttgaaattaaacgttaa

SEQ ID NO: 829 - DNA, 1821 bp, Artificial Sequence
  Description of Artificial Sequence: Synthetic polynucleotide
  Anti-CTLA-4 single chain antibody coding region (Heavy Chain linker Light Chain) with N terminal and C terminal Secretion Tag for Type V auto-secreter
atgaacaaagtatatagcctgaaatattgcccagtaactgggggtctgattgtagtcagtgaactggcatcccgcgtcatcaaaaaaacctgccgtcgtctgactcacatcctgctggcgggtattccggctgtgtatctgtactacccgcagatctcccaggcaggtatcgtccgccaggtacaattagttgagagcggcggcggtgtggttcaaccgggccgtagtctgcgattgtcttgtgctgcatctggttttactttcagttcttacacgatgcactgggttcgccaagctccgggcaaaggcctggagtgggttacctttatttcttacgatggcaataataagtattacgctgattctgtgaaaggtcgctttactattagccgagataactctaaaaatactctgtatctgcaaatgaattctctgcgtgcggaagatactgcgatctattattgtgcgcgtactggttggctgggcccgtttgattattggggccaaggcacgctggttactgttagttcgggcggcggttctggtggcggctctggtggtggctctggcggcggcgagattgtgctgactcaatctccgggcacgctgtcactgtctccgggtgaacgcgcgaccctgtcttgtcgcgcgagtcaaagtgttggttcttcttatctggcttggtatcagcaaaagcctggtcaagcgccgcgtctgttgatttatggcgcgttttcgcgcgcgactggcattccggaccgattttctggttctggttctggcactgatttcactctgaccatttcacgcctggaaccggaggattttgcggtgtactattgccaacaatatggctcatcgccgtggacgtttggccaaggtactaaagttgagattaaattcaaagcggaggctgacaaggccgctgcagcaaaagctgactcctttatgaacgcgggttacaaaaacttcatgaccgaggtaaataatctcaataaacgtatgggtgatctgcgcgacactaatggggatgcaggcgcatgggcacgcattatgtctggtgcaggttcggcggatggcgggtattctgacaattacactcatgttcaggtgggcttcgataaaaaacatgagctggacggtgtggatctgttcactggcgtaaccatgacttatactgattcaagcgcagacagccacgcattttcaggtaaaacgaaatcagttggcggcggtctgtatgcgagcgcactgttcgagagcggcgcctacattgatctaattggcaagtatattcaccatgataatgattacacagggaactttgcaggcctgggcaccaaacactataacacgcattcatggtacgctggcgcagaaaccggctatagataccacctgaccgaggaaacctttatcgaaccgcaagcggaactggtttacggtgcggtcagtggcaagacctttcgttggaaagatggtgatatggatctgtcaatgaaaaaccgcgacttcagccccttgatcggccgcaccggcattgagctgggcaaaaccttctctggcaaagattggtctgttaccgcgcgtgcgggcacttcgtggcaatttgatctgctaaacaacggtgagactgtactgcgtgatgcgagtggcgaaaaacgtattaaaggtgaaaaagatagtagaatgctattcaacgtgggcatgaatgcgcagatcaaagataacatgcgttttgggttggagtttgaaaaatccgcgttcggtaaatataatgttgacaatgctgtgaacgcgaatttccgctacatgttttaa

SEQ ID NO: 830 - DNA, 1821 bp, Artificial Sequence
  Description of Artificial Sequence: Synthetic polynucleotide
  Anti-CTLA-4 single chain antibody coding region (Light Chain linker Heavy Chain) with N terminal and C terminal Secretion Tag for Type V auto-secreter
atgaacaaagtatatagcctgaaatattgcccagtaactgggggtctgattgtagtcagtgaactggcatcccgcgtcatcaaaaaaacctgccgtcgtctgactcacatcctgctggcgggtattccggctgtgtatctgtactacccgcagatctcccaggcaggtatcgtccgcgaaattgtactgacccagtcgcctggtaccctgtctctgtcgccgggtgaacgtgctaccctgtcttgtcgtgcttcgcaatcggttggctcgtcttatctggcatggtatcagcaaaaaccgggccaagcgcctcgtctgctgatttatggcgcgttttctcgtgctacgggcattcctgatcgtttttcgggctctggctctggtactgattttacgctgactatcagccgcttggaacctgaagattttgcggtttattattgccaacaatatggctcttctccgtggacgtttggtcaaggcactaaagttgaaattaaaggtggtggctcgggcggtggttctggtggtggtagtggtggtggtcaagtgcagttggttgaatcgggtggcggtgttgtgcagccgggccgttcgttgcgtctgtcttgcgcagcgagtggtttcaccttctcttcttatactatgcactgggtgcgtcaagcacctggcaaaggtctggagtgggtaacttttatttcatacgatggtaataataaatattatgcagattctgttaaaggtcgctttacgatttctcgcgataattcaaaaaatacgctgtatctgcagatgaattcgctgcgcgctgaggatactgcgatctactattgtgcgcgtactggttggctgggtccgtttgattactggggccaaggtacgctggttacagtttcgtcgttcaaagcggaggctgacaaggccgctgcagcaaaagctgactcctttatgaacgcgggttacaaaaacttcatgaccgaggtaaataatctcaataaacgtatgggtgatctgcgcgacactaatggggatgcaggcgcatgggcacgcattatgtctggtgcaggttcggcggatggcgggtattctgacaattacactcatgttcaggtgggcttcgataaaaaacatgagctggacggtgtggatctgttcactggcgtaaccatgacttatactgattcaagcgcagacagccacgcattttcaggtaaaacgaaatcagttggcggcggtctgtatgcgagcgcactgttcgagagcggcgcctacattgatctaattggcaagtatattcaccatgataatgattacacagggaactttgcaggcctgggcaccaaacactataacacgcattcatggtacgctggcgcagaaaccggctatagataccacctgaccgaggaaacctttatcgaaccgcaagcggaactggtttacggtgcggtcagtggcaagacctttcgttggaaagatggtgatatggatctgtcaatgaaaaaccgcgacttcagccccttgatcggccgcaccggcattgagctgggcaaaaccttctctggcaaagattggtctgttaccgcgcgtgcgggcacttcgtggcaatttgatctgctaaacaacggtgagactgtactgcgtgatgcgagtggcgaaaaacgtattaaaggtgaaaaagatagtagaatgctattcaacgtgggcatgaatgcgcagatcaaagataacatgcgttttgggttggagtttgaaaaatccgcgttcggtaaatataatgttgacaatgctgtgaacgcgaatttccgctacatgttttaa

SEQ ID NO: 831 - DNA, 1803 bp, Artificial Sequence
  Description of Artificial Sequence: Synthetic polynucleotide
  Anti-PD-1 single chain antibody coding region (Heavy Chain linker  Light Chain) with N terminal and C terminal Secretion Tag for Type V auto-secreter
atgaacaaagtatatagcctgaaatattgcccagtaactgggggtctgattgtagtcagtgaactggcatcccgcgtcatcaaaaaaacctgccgtcgtctgactcacatcctgctggcgggtattccggctgtgtatctgtactacccgcagatctcccaggcaggtatcgtccgccaagtacaactggttgaatccggcggaggagtggtgcaaccgggccgcagtttgcgtctggattgtaaagcttcaggcatcactttttctaattctggtatgcactgggttcgccaagctccgggtaaaggtctggagtgggttgcggtgatctggtatgatggttctaaacgatattatgcggatagtgttaagggtcgttttactatttctcgtgataattctaagaacaccttgtttctgcagatgaatagtctgcgcgctgaggatactgcggtatattattgtgcgactaatgacgattattggggccaaggcacgctggttaccgtgagctctggtggtggttcgggtggtggttctggtggtgggagcggcggtggcgagatcgttctgactcaaagcccggcgactctgagtctgagtccgggtgaacgtgcgactctgagctgccgtgcgtctcagagtgtgtcgagttatctggcgtggtaccaacaaaaaccgggccaggcgccgcgactgctgatttatgatgcttctaatcgtgcgactggtattccggcgcgctttagcggttctggctcaggcactgacttcactctgactatttcttcgctggaaccggaagattttgcggtgtactattgtcaacaatcatctaattggcctcgtacgttcggtcaaggtacaaaagtggagataaaattcaaagcggaggctgacaaggccgctgcagcaaaagctgactcctttatgaacgcgggttacaaaaacttcatgaccgaggtaaataatctcaataaacgtatgggtgatctgcgcgacactaatggggatgcaggcgcatgggcacgcattatgtctggtgcaggttcggcggatggcgggtattctgacaattacactcatgttcaggtgggcttcgataaaaaacatgagctggacggtgtggatctgttcactggcgtaaccatgacttatactgattcaagcgcagacagccacgcattttcaggtaaaacgaaatcagttggcggcggtctgtatgcgagcgcactgttcgagagcggcgcctacattgatctaattggcaagtatattcaccatgataatgattacacagggaactttgcaggcctgggcaccaaacactataacacgcattcatggtacgctggcgcagaaaccggctatagataccacctgaccgaggaaacctttatcgaaccgcaagcggaactggtttacggtgcggtcagtggcaagacctttcgttggaaagatggtgatatggatctgtcaatgaaaaaccgcgacttcagccccttgatcggccgcaccggcattgagctgggcaaaaccttctctggcaaagattggtctgttaccgcgcgtgcgggcacttcgtggcaatttgatctgctaaacaacggtgagactgtactgcgtgatgcgagtggcgaaaaacgtattaaaggtgaaaaagatagtagaatgctattcaacgtgggcatgaatgcgcagatcaaagataacatgcgttttgggttggagtttgaaaaatccgcgttcggtaaatataatgttgacaatgctgtgaacgcgaatttccgctacatgttttaa

SEQ ID NO: 832 - DNA, 1803 bp, Artificial Sequence
  Description of Artificial Sequence: Synthetic polynucleotide
  Anti-PD-1 single chain antibody coding region (Light Chain linker Heavy Chain) with N terminal and C terminal Secretion Tag for Type V auto-secreter
atgaacaaagtatatagcctgaaatattgcccagtaactgggggtctgattgtagtcagtgaactggcatcccgcgtcatcaaaaaaacctgccgtcgtctgactcacatcctgctggcgggtattccggctgtgtatctgtactacccgcagatctcccaggcaggtatcgtccgcgaaatcgtgctgactcagagtccggcgactctgtctctgagtccgggcgaacgcgcgactctgtcttgccgtgcgtctcaatctgtgtcttcatacttggcttggtaccaacaaaaaccgggccaggcgccgcgactgttgatttatgatgcgtcgaatcgcgcgactggcattccggcgcgcttttcgggtagcggttctggtactgattttacgctgactatctcttctctggagcctgaagatttcgctgtttattactgccaacagtctagtaattggccgcgtactttcggccagggcactaaggtggaaattaaaggtggcggctcgggcggcggctcgggtggtggttctggtggtggccaagtgcaactggtggaaagtggcggcggggtggtgcaaccgggccgttctctgcgcctggattgtaaagcttcaggcattacttttagcaactctggtatgcactgggttcgccaagctccgggcaaaggcctggaatgggtggcggttatttggtacgatggctctaaacgttattacgctgacagtgttaaaggccgctttaccatttctcgtgataattctaaaaataccctgtttctgcaaatgaactcgctgcgcgcggaagatactgctgtttactattgtgcgactaatgatgattactggggtcaaggtaccctggttaccgtgtcttctttcaaagcggaggctgacaaggccgctgcagcaaaagctgactcctttatgaacgcgggttacaaaaacttcatgaccgaggtaaataatctcaataaacgtatgggtgatctgcgcgacactaatggggatgcaggcgcatgggcacgcattatgtctggtgcaggttcggcggatggcgggtattctgacaattacactcatgttcaggtgggcttcgataaaaaacatgagctggacggtgtggatctgttcactggcgtaaccatgacttatactgattcaagcgcagacagccacgcattttcaggtaaaacgaaatcagttggcggcggtctgtatgcgagcgcactgttcgagagcggcgcctacattgatctaattggcaagtatattcaccatgataatgattacacagggaactttgcaggcctgggcaccaaacactataacacgcattcatggtacgctggcgcagaaaccggctatagataccacctgaccgaggaaacctttatcgaaccgcaagcggaactggtttacggtgcggtcagtggcaagacctttcgttggaaagatggtgatatggatctgtcaatgaaaaaccgcgacttcagccccttgatcggccgcaccggcattgagctgggcaaaaccttctctggcaaagattggtctgttaccgcgcgtgcgggcacttcgtggcaatttgatctgctaaacaacggtgagactgtactgcgtgatgcgagtggcgaaaaacgtattaaaggtgaaaaagatagtagaatgctattcaacgtgggcatgaatgcgcagatcaaagataacatgcgttttgggttggagtttgaaaaatccgcgttcggtaaatataatgttgacaatgctgtgaacgcgaatttccgctacatgttttaa

SEQ ID NO: 833 - DNA, 1821 bp, Artificial Sequence
  Description of Artificial Sequence: Synthetic polynucleotide
  Anti-PD-L1 single chain antibody coding region (Light Chain linker Heavy Chain) with N terminal and C terminal Secretion Tag for Type V auto-secreter
atgaacaaagtatatagcctgaaatattgcccagtaactgggggtctgattgtagtcagtgaactggcatcccgcgtcatcaaaaaaacctgccgtcgtctgactcacatcctgctggcgggtattccggctgtgtatctgtactacccgcagatctcccaggcaggtatcgtccgcgatattcaaatgactcaatctccgagctctctgagtgcgtctgtgggtgatcgtgtgactattacttgtcgtgcgtctcaagatgtttcaactgcggttgcgtggtatcaacagaaaccgggcaaggcgcctaagctgctgatttattctgcttcgttcctgtacagcggtgtgccgtctcgtttctctggctctggttcgggtactgatttcactctgactatttcgagtctgcagccggaagattttgcgacttattattgtcaacaatatctgtatcaccctgcgacgtttggtcaaggcacgaaagttgaaattaaacgtggtggtggctctggtggtggcagcggtggtgggtcgggtggcggtgaagttcaactggttgagtcaggtggtggcctggtgcaaccgggcggctctctgcgcctgtcttgtgctgcgtcgggttttacgttctctgatagctggattcactgggtacgccaggcaccgggcaaaggtctggaatgggtagcttggatttcaccttatggtggctctacttattacgcggatagcgtgaaaggtcgctttactatttctgcggacactagcaaaaatactgcttacctgcaaatgaattcgctgcgtgctgaggatactgcagtgtattactgtgcgcgtcgtcattggcctggcggctttgattattggggtcaaggtactctggttactgttagcagcttcaaagcggaggctgacaaggccgctgcagcaaaagctgactcctttatgaacgcgggttacaaaaacttcatgaccgaggtaaataatctcaataaacgtatgggtgatctgcgcgacactaatggggatgcaggcgcatgggcacgcattatgtctggtgcaggttcggcggatggcgggtattctgacaattacactcatgttcaggtgggcttcgataaaaaacatgagctggacggtgtggatctgttcactggcgtaaccatgacttatactgattcaagcgcagacagccacgcattttcaggtaaaacgaaatcagttggcggcggtctgtatgcgagcgcactgttcgagagcggcgcctacattgatctaattggcaagtatattcaccatgataatgattacacagggaactttgcaggcctgggcaccaaacactataacacgcattcatggtacgctggcgcagaaaccggctatagataccacctgaccgaggaaacctttatcgaaccgcaagcggaactggtttacggtgcggtcagtggcaagacctttcgttggaaagatggtgatatggatctgtcaatgaaaaaccgcgacttcagccccttgatcggccgcaccggcattgagctgggcaaaaccttctctggcaaagattggtctgttaccgcgcgtgcgggcacttcgtggcaatttgatctgctaaacaacggtgagactgtactgcgtgatgcgagtggcgaaaaacgtattaaaggtgaaaaagatagtagaatgctattcaacgtgggcatgaatgcgcagatcaaagataacatgcgttttgggttggagtttgaaaaatccgcgttcggtaaatataatgttgacaatgctgtgaacgcgaatttccgctacatgttttaa

SEQ ID NO: 834 - DNA, 1821 bp, Artificial Sequence
  Description of Artificial Sequence: Synthetic polynucleotide
  Anti-PD-L1 single chain antibody coding region (Heavy Chain linker Light Chain) with N terminal and C terminal Secretion Tag for Type V auto-secreter
atgaacaaagtatatagcctgaaatattgcccagtaactgggggtctgattgtagtcagtgaactggcatcccgcgtcatcaaaaaaacctgccgtcgtctgactcacatcctgctggcgggtattccggctgtgtatctgtactacccgcagatctcccaggcaggtatcgtccgcgaagtgcagctggtggagtcaggtggaggcttggtgcaaccgggcggttcactgcgtctgtcatgtgcggcgtctgggtttacttttagtgactcttggattcactgggtgcgccaggctccgggtaaaggcctggaatgggtagcttggattagtccttacggtggctcgacctattatgctgattcggtaaagggtcgctttactattagcgctgatacttctaaaaatactgcatacctgcagatgaatagcctgcgcgctgaggatactgctgtgtattattgcgcgcgtcgccactggccgggcggctttgattattggggccaaggtactctggttaccgtgtctagtggcggtggtagcggcggcggctcaggtggcggctcgggcggtggcgacattcagatgactcagtctccgtcttctttgtcggcgagcgtgggcgatcgtgttaccatcacgtgtcgcgcgagccaagatgtgtcgactgcggtggcttggtatcaacaaaaaccgggtaaagctccgaaactgctgatttatagtgcgtcttttttgtattctggtgttccgtctcgtttctctggctcaggtagcggtactgattttacgctgactatttcttcactgcaaccggaagattttgctacgtattattgtcaacaatatctgtatcacccggcgacgtttggtcagggtactaaggtggagataaaacgcttcaaagcggaggctgacaaggccgctgcagcaaaagctgactcctttatgaacgcgggttacaaaaacttcatgaccgaggtaaataatctcaataaacgtatgggtgatctgcgcgacactaatggggatgcaggcgcatgggcacgcattatgtctggtgcaggttcggcggatggcgggtattctgacaattacactcatgttcaggtgggcttcgataaaaaacatgagctggacggtgtggatctgttcactggcgtaaccatgacttatactgattcaagcgcagacagccacgcattttcaggtaaaacgaaatcagttggcggcggtctgtatgcgagcgcactgttcgagagcggcgcctacattgatctaattggcaagtatattcaccatgataatgattacacagggaactttgcaggcctgggcaccaaacactataacacgcattcatggtacgctggcgcagaaaccggctatagataccacctgaccgaggaaacctttatcgaaccgcaagcggaactggtttacggtgcggtcagtggcaagacctttcgttggaaagatggtgatatggatctgtcaatgaaaaaccgcgacttcagccccttgatcggccgcaccggcattgagctgggcaaaaccttctctggcaaagattggtctgttaccgcgcgtgcgggcacttcgtggcaatttgatctgctaaacaacggtgagactgtactgcgtgatgcgagtggcgaaaaacgtattaaaggtgaaaaagatagtagaatgctattcaacgtgggcatgaatgcgcagatcaaagataacatgcgttttgggttggagtttgaaaaatccgcgttcggtaaatataatgttgacaatgctgtgaacgcgaatttccgctacatgttttaa

SEQ ID NO: 835 - DNA, 885 bp, Artificial Sequence
  Description of Artificial Sequence: Synthetic polynucleotide
  Anti-CTLA-4 single chain antibody coding region (Heavy Chain linker Light Chain) for type I hemolysin secretion, including HlyA tag
atgcaggtacaattagttgagagcggcggcggtgtggttcaaccgggccgtagtctgcgattgtcttgtgctgcatctggttttactttcagttcttacacgatgcactgggttcgccaagctccgggcaaaggcctggagtgggttacctttatttcttacgatggcaataataagtattacgctgattctgtgaaaggtcgctttactattagccgagataactctaaaaatactctgtatctgcaaatgaattctctgcgtgcggaagatactgcgatctattattgtgcgcgtactggttggctgggcccgtttgattattggggccaaggcacgctggttactgttagttcgggcggcggttctggtggcggctctggtggtggctctggcggcggcgagattgtgctgactcaatctccgggcacgctgtcactgtctccgggtgaacgcgcgaccctgtcttgtcgcgcgagtcaaagtgttggttcttcttatctggcttggtatcagcaaaagcctggtcaagcgccgcgtctgttgatttatggcgcgttttcgcgcgcgactggcattccggaccgattttctggttctggttctggcactgatttcactctgaccatttcacgcctggaaccggaggattttgcggtgtactattgccaacaatatggctcatcgccgtggacgtttggccaaggtactaaagttgagattaaacttaatccattaattaatgaaatcagcaaaatcatttcagctgcaggtaattttgatgttaaagaggaaagagctgcagcttctttattgcagttgtccggtaatgccagtgatttttcatatggacggaactcaataactttgacagcatcagcataa

SEQ ID NO: 836 - DNA, 885 bp, Artificial Sequence
  Description of Artificial Sequence: Synthetic polynucleotide
  Anti-CTLA-4 single chain antibody coding region (Light Chain linker Heavy Chain) for type I hemolysin secretion, including HlyA tag
atggaaattgtactgacccagtcgcctggtaccctgtctctgtcgccgggtgaacgtgctaccctgtcttgtcgtgcttcgcaatcggttggctcgtcttatctggcatggtatcagcaaaaaccgggccaagcgcctcgtctgctgatttatggcgcgttttctcgtgctacgggcattcctgatcgtttttcgggctctggctctggtactgattttacgctgactatcagccgcttggaacctgaagattttgcggtttattattgccaacaatatggctcttctccgtggacgtttggtcaaggcactaaagttgaaattaaaggtggtggctcgggcggtggttctggtggtggtagtggtggtggtcaagtgcagttggttgaatcgggtggcggtgttgtgcagccgggccgttcgttgcgtctgtcttgcgcagcgagtggtttcaccttctcttcttatactatgcactgggtgcgtcaagcacctggcaaaggtctggagtgggtaacttttatttcatacgatggtaataataaatattatgcagattctgttaaaggtcgctttacgatttctcgcgataattcaaaaaatacgctgtatctgcagatgaattcgctgcgcgctgaggatactgcgatctactattgtgcgcgtactggttggctgggtccgtttgattactggggccaaggtacgctggttacagtttcgtcgcttaatccattaattaatgaaatcagcaaaatcatttcagctgcaggtaattttgatgttaaagaggaaagagctgcagcttctttattgcagttgtccggtaatgccagtgatttttcatatggacggaactcaataactttgacagcatcagcataa

SEQ ID NO: 837 - DNA, 867 bp, Artificial Sequence
  Description of Artificial Sequence: Synthetic polynucleotide
  Anti-PD-1 single chain antibody coding region (Heavy Chain linker Light Chain) for type I hemolysin secretion, including HlyA tag
atgcaagtacaactggttgaatccggcggaggagtggtgcaaccgggccgcagtttgcgtctggattgtaaagcttcaggcatcactttttctaattctggtatgcactgggttcgccaagctccgggtaaaggtctggagtgggttgcggtgatctggtatgatggttctaaacgatattatgcggatagtgttaagggtcgttttactatttctcgtgataattctaagaacaccttgtttctgcagatgaatagtctgcgcgctgaggatactgcggtatattattgtgcgactaatgacgattattggggccaaggcacgctggttaccgtgagctctggtggtggttcgggtggtggttctggtggtgggagcggcggtggcgagatcgttctgactcaaagcccggcgactctgagtctgagtccgggtgaacgtgcgactctgagctgccgtgcgtctcagagtgtgtcgagttatctggcgtggtaccaacaaaaaccgggccaggcgccgcgactgctgatttatgatgcttctaatcgtgcgactggtattccggcgcgctttagcggttctggctcaggcactgacttcactctgactatttcttcgctggaaccggaagattttgcggtgtactattgtcaacaatcatctaattggcctcgtacgttcggtcaaggtacaaaagtggagataaaacttaatccattaattaatgaaatcagcaaaatcatttcagctgcaggtaattttgatgttaaagaggaaagagctgcagcttctttattgcagttgtccggtaatgccagtgatttttcatatggacggaactcaataactttgacagcatcagcataa

SEQ ID NO: 838 - DNA, 867 bp, Artificial Sequence
  Description of Artificial Sequence: Synthetic polynucleotide
  Anti-PD-1 single chain antibody coding region (Light Chain linker Heavy Chain) for type I hemolysin secretion, including HlyA tag
atggaaatcgtgctgactcagagtccggcgactctgtctctgagtccgggcgaacgcgcgactctgtcttgccgtgcgtctcaatctgtgtcttcatacttggcttggtaccaacaaaaaccgggccaggcgccgcgactgttgatttatgatgcgtcgaatcgcgcgactggcattccggcgcgcttttcgggtagcggttctggtactgattttacgctgactatctcttctctggagcctgaagatttcgctgtttattactgccaacagtctagtaattggccgcgtactttcggccagggcactaaggtggaaattaaaggtggcggctcgggcggcggctcgggtggtggttctggtggtggccaagtgcaactggtggaaagtggcggcggggtggtgcaaccgggccgttctctgcgcctggattgtaaagcttcaggcattacttttagcaactctggtatgcactgggttcgccaagctccgggcaaaggcctggaatgggtggcggttatttggtacgatggctctaaacgttattacgctgacagtgttaaaggccgctttaccatttctcgtgataattctaaaaataccctgtttctgcaaatgaactcgctgcgcgcggaagatactgctgtttactattgtgcgactaatgatgattactggggtcaaggtaccctggttaccgtgtcttctcttaatccattaattaatgaaatcagcaaaatcatttcagctgcaggtaattttgatgttaaagaggaaagagctgcagcttctttattgcagttgtccggtaatgccagtgatttttcatatggacggaactcaataactttgacagcatcagcataa

SEQ ID NO: 839 - DNA, 885 bp, Artificial Sequence
  Description of Artificial Sequence: Synthetic polynucleotide
  Anti-PD-L1 single chain antibody coding region (Light Chain linker Heavy Chain) for type I hemolysin secretion, including HlyA tag
atggatattcaaatgactcaatctccgagctctctgagtgcgtctgtgggtgatcgtgtgactattacttgtcgtgcgtctcaagatgtttcaactgcggttgcgtggtatcaacagaaaccgggcaaggcgcctaagctgctgatttattctgcttcgttcctgtacagcggtgtgccgtctcgtttctctggctctggttcgggtactgatttcactctgactatttcgagtctgcagccggaagattttgcgacttattattgtcaacaatatctgtatcaccctgcgacgtttggtcaaggcacgaaagttgaaattaaacgtggtggtggctctggtggtggcagcggtggtgggtcgggtggcggtgaagttcaactggttgagtcaggtggtggcctggtgcaaccgggcggctctctgcgcctgtcttgtgctgcgtcgggttttacgttctctgatagctggattcactgggtacgccaggcaccgggcaaaggtctggaatgggtagcttggatttcaccttatggtggctctacttattacgcggatagcgtgaaaggtcgctttactatttctgcggacactagcaaaaatactgcttacctgcaaatgaattcgctgcgtgctgaggatactgcagtgtattactgtgcgcgtcgtcattggcctggcggctttgattattggggtcaaggtactctggttactgttagcagccttaatccattaattaatgaaatcagcaaaatcatttcagctgcaggtaattttgatgttaaagaggaaagagctgcagcttctttattgcagttgtccggtaatgccagtgatttttcatatggacggaactcaataactttgacagcatcagcataa

SEQ ID NO: 840 - DNA, 885 bp, Artificial Sequence
  Description of Artificial Sequence: Synthetic polynucleotide
  Anti-PD-L1 single chain antibody coding region (Heavy Chain linker Light Chain) for type I hemolysin secretion, including HlyA tag
atggaagtgcagctggtggagtcaggtggaggcttggtgcaaccgggcggttcactgcgtctgtcatgtgcggcgtctgggtttacttttagtgactcttggattcactgggtgcgccaggctccgggtaaaggcctggaatgggtagcttggattagtccttacggtggctcgacctattatgctgattcggtaaagggtcgctttactattagcgctgatacttctaaaaatactgcatacctgcagatgaatagcctgcgcgctgaggatactgctgtgtattattgcgcgcgtcgccactggccgggcggctttgattattggggccaaggtactctggttaccgtgtctagtggcggtggtagcggcggcggctcaggtggcggctcgggcggtggcgacattcagatgactcagtctccgtcttctttgtcggcgagcgtgggcgatcgtgttaccatcacgtgtcgcgcgagccaagatgtgtcgactgcggtggcttggtatcaacaaaaaccgggtaaagctccgaaactgctgatttatagtgcgtcttttttgtattctggtgttccgtctcgtttctctggctcaggtagcggtactgattttacgctgactatttcttcactgcaaccggaagattttgctacgtattattgtcaacaatatctgtatcacccggcgacgtttggtcagggtactaaggtggagataaaacgccttaatccattaattaatgaaatcagcaaaatcatttcagctgcaggtaattttgatgttaaagaggaaagagctgcagcttctttattgcagttgtccggtaatgccagtgatttttcatatggacggaactcaataactttgacagcatcagcataa

SEQ ID NO: 841 - DNA, 159 bp, Artificial Sequence; identical to SEQ ID NO: 754
  Description of Artificial Sequence: Synthetic polynucleotide
  C terminal HlyA secretion Tag

SEQ ID NO: 842 - DNA, 2124 bp, Artificial Sequence
  Description of Artificial Sequence: Synthetic polynucleotide
  HlyB coding sequence
atggattcttgtcataaaattgattatgggttatacgccctggagattttagcccaataccataacgtctctgttaacccggaagaaattaaacatagatttgacacagacgggactggtctgggattaacgtcatggttgcttgctgcgaaatctttagaactaaaggtaaaacaggtaaaaaaaacaattgaccgattaaactttatttctttgcccgcattagtctggagagaggatggacgtcattttattctgactaaagtcagtaaagaagcaaacagatatcttatttttgatctggagcaacgaaatccccgtgttctcgaacagtctgagtttgaggcgttatatcaggggcatattattcttattgcttcccgttcttctgttaccgggaaactggcaaaatttgactttacctggtttatccctgccattataaaatacagaaaaatatttattgaaacccttgttgtatctgtttttttacaattatttgcattaataaccccccttttttttcaggtggttatggacaaagtattagtacacagggggttttcaacccttaatgttattactgtcgcattatctgttgtggtggtgtttgagattatactcagcggtttaagaacttacatttttgcacatagtacaagtcggattgatgttgagttgggtgccaaactcttccggcatttactggcgctaccgatctcttattttgagagtcgtcgtgttggtgatactgttgccagggtaagagaattagaccagatccgtaattttctgacaggacaggcattaacatctgttctggacttattattttcattcatattttttgcggtaatgtggtattacagcccaaagcttactctggtgatcttattttcgctgccctgttatgctgcatggtctgtttttattagccccattttgcgacgtcgccttgatgataagttttcacggaatgcggataatcaatctttcctggtggaatcagtcacggcgattaacactataaaagctatggcagtctcacctcagatgacgaacatatgggacaaacaattggcaggatatgttgctgcaggctttaaagtgacagtattagccaccattggtcaacaaggaatacagttaatacaaaagactgttatgatcatcaacctgtggttgggagcacacctggttatttccggggatttaagtattggtcagttaattgcttttaatatgcttgctggtcagattgttgcaccggttattcgccttgcacaaatctggcaggatttccagcaggttggtatatcagttacccgccttggtgatgtgcttaactctccaactgaaagttatcatgggaaactggcattaccggaaattaatggtaatatcacttttcgtaatatccggtttcgctataagcctgactctccggttattttagataatatcaatctcagtattaagcagggggaggttattggtattgtcggacgttctggttcaggaaaaagcacattaactaaattaattcaacgtttttatattcctgaaaatggccaggtcttaattgatggacatgatcttgcgttggccgatcctaactggttacgtcgtcaggtgggggttgtgttgcaggacaatgtgctgcttaatcgcagtattattgataatatctcactggctaatcctggtatgtccgtcgaaaaagttatttatgcagcgaaattagcaggcgctcatgattttatttctgaattgcgtgaggggtataacaccattgtcggggaacagggggcaggattatccggaggtcaacgtcaacgcatcgcaattgcaagggcgctggtgaacaaccctaaaatacttatttttgatgaagcaaccagtgctctggattatgagtcggagcatatcatcatgcgcaatatgcacaaaatatgtaagggcagaacggttataatcattgctcatcgtctgtctacagtaaaaaatgcagaccgcattattgtcatggaaaaagggaaaattgttgaacagggtaaacataaggaactgctttctgaaccggaaagtttatacagttacttatatcagttacagtcagactaa

SEQ ID NO: 843 - DNA, 1437 bp, Artificial Sequence
  Description of Artificial Sequence: Synthetic polynucleotide
  HlyD coding sequence
atgaaaacatggttaatggggttcagcgagttcctgttgcgctataaacttgtctggagtgaaacatggaaaatccggaagcaattagatactccggtacgtgaaaaggacgaaaatgaattcttacccgctcatctggaattaattgaaacgccggtatccagacggccgcgtctggttgcttattttattatggggtttctggttattgctgtcattttatctgttttaggtcaggtggaaattgttgccactgcaaatgggaaattaacactaagtgggcgcagcaaagaaattaaacctattgaaaactcaatagttaaagaaattatcgtaaaagaaggagagtcagtccggaaaggggatgtgttattaaagcttacagcactgggagctgaagctgatacgttaaaaacacagtcatcactgttacagaccaggctggaacaaactcggtatcaaattctgagcaggtcaattgaattaaataaactacctgaactgaagcttcctgatgagccttattttcagaatgtatctgaagaggaagtactgcgtttaacttctttgataaaagaacagttttccacatggcaaaatcagaagtatcaaaaagaactgaatctggataagaaaagagcagagcgattaacaatacttgcccgtataaaccgttatgaaaatttatcgagagttgaaaaaagccgtctggatgatttcaggagtttattgcataaacaggcaattgcaaaacatgctgtacttgagcaggagaataaatatgtcgaggcagcaaatgaattacgggtttataaatcgcaactggagcaaattgagagtgagatattgtctgcaaaagaagaatatcagcttgtcacgcagctttttaaaaatgaaattttagacaagctaagacaaacaacagacaacattgagttattaactctggagttagagaaaaatgaagagcgtcaacaggcttcagtaatcagggcccctgtttcgggaaaagttcagcaactgaaggttcatactgaaggtggggttgttacaacagcggaaacactgatggtcatcgttccggaagatgacacgctggaggttactgctctggtacaaaataaagatattggttttattaacgtcgggcagaatgccatcattaaagtggaggcctttccttacacccgatatggttatctggtgggtaaggtgaaaaatataaatttagatgcaatagaagaccagaaactgggactcgtttttaatgtcattgtttctgttgaagagaatgatttgtcaaccgggaataagcacattccattaagctcgggtatggctgtcactgcagaaataaagactggaatgcgaagcgtaatcagctatcttcttagtcctctggaagagtctgtaacagaaagtttacatgagcgttaa

SEQ ID NO: 844 - protein, 119 aa, Artificial Sequence
  Description of Artificial Sequence: Synthetic polypeptide
  Anti-CTLA-4 Heavy
MQVQLVESGGGVVQPGRSLRLSCAASGFTFSSYTMHWVRQAPGKGLEWVTFISYDGNNKYYADSVKGRFTISRDNSKNTLYLQMNSLRAEDTAIYYCARTGWLGPFDYWGQGTLVTVSS

SEQ ID NO: 845 - protein, 108 aa, Artificial Sequence; identical to SEQ ID NO: 8
  Description of Artificial Sequence: Synthetic polypeptide
  Anti-CTLA-4 Light

SEQ ID NO: 846 - protein, 114 aa, Artificial Sequence
  Description of Artificial Sequence: Synthetic polypeptide
  Anti-PD-1 Heavy
MQVQLVESGGGVVQPGRSLRLDCKASGITFSNSGMHWVRQAPGKGLEWVAVIWYDGSKRYYADSVKGRFTISRDNSKNTLFLQMNSLRAEDTAVYYCATNDDYWGQGTLVTVSS

SEQ ID NO: 847 - protein, 107 aa, Artificial Sequence [sequence omitted]

SEQ ID NO: 848 - protein, 109 aa, Artificial Sequence
  Description of Artificial Sequence: Synthetic polypeptide
  Anti-PD-L1 Light
MDIQMTQSPSSLSASVGDRVTITCRASQDVSTAVAWYQQKPGKAPKLLIYSASFLYSGVPSRFSGSGSGTDFTLTISSLQPEDFATYYCQQYLYHPATFGQGTKVEIKR

SEQ ID NO: 849 - protein, 118 aa, Artificial Sequence [sequence omitted]

SEQ ID NO: 850 - protein, 15 aa, Artificial Sequence
  Description of Artificial Sequence: Synthetic peptide
  Linker
GGGSGGGSGGGSGGG

SEQ ID NO: 851 - protein, 59 aa, Artificial Sequence
  Description of Artificial Sequence: Synthetic polypeptide
  N Terminal Secretion Tag For Type V Auto-secreter Secretion
MNKVYSLKYCPVTGGLIVVSELASRVIKKTCRRLTHILLAGIPAVYLYYPQISQAGIVR

SEQ ID NO: 852 - protein, 162 aa, Artificial Sequence
  Description of Artificial Sequence: Synthetic polypeptide
  C Terminal Secretion Tag For Type V Auto-secreter Secretion
FKAEADKAAAAKADSFMNAGYKNFMTEVNNLNKRMGDLRDTNGDAGAWARIMSGAGSADGGYSDNYTHVQVGFDKKHELDGVDLFTGVTMTYTDSSADSHAFSGKTKSVGGGLYASALFESGAYIDLIGKYIHHDNDYTGNFAGLGTKHYNTHSWYAGAETG

SEQ ID NO: 853 - protein, 52 aa, Artificial Sequence; identical to SEQ ID NO: 753
  Description of Artificial Sequence: Synthetic polypeptide
  C-Terminal HlyA Secretion Tag

SEQ ID NO: 854 - protein, 707 aa, Artificial Sequence
  Description of Artificial Sequence: Synthetic polypeptide
  HlyB
MDSCHKIDYGLYALEILAQYHNVSVNPEEIKHRFDTDGTGLGLTSWLLAAKSLELKVKQVKKTIDRLNFISLPALVWREDGRHFILTKVSKEANRYLIFDLEQRNPRVLEQSEFEALYQGHIILIASRSSVTGKLAKFDFTWFIPAIIKYRKIFIETLVVSVFLQLFALITPLFFQVVMDKVLVHRGFSTLNVITVALSVVVVFEIILSGLRTYIFAHSTSRIDVELGAKLFRHLLALPISYFESRRVGDTVARVRELDQIRNFLTGQALTSVLDLLFSFIFFAVMWYYSPKLTLVILFSLPCYAAWSVFISPILRRRLDDKFSRNADNQSFLVESVTAINTIKAMAVSPQMTNIWDKQLAGYVAAGFKVTVLATIGQQGIQLIQKTVMIINLWLGAHLVISGDLSIGQLIAFNMLAGQIVAPVIRLAQIWQDFQQVGISVTRLGDVLNSPTESYHGKLALPEINGNITFRNIRFRYKPDSPVILDNINLSIKQGEVIGIVGRSGSGKSTLTKLIQRFYIPENGQVLIDGHDLALADPNWLRRQVGVVLQDNVLLNRSIIDNISLANPGMSVEKVIYAAKLAGAHDFISELREGYNTIVGEQGAGLSGGQRQRIAIARALVNNPKILIFDEATSALDYESEHIIMRNMHKICKGRTVIIIAHRLSTVKNADRIIVMEKGKIVEQGKHKELLSEPESLYSYLYQLQSD

SEQ ID NO: 855 - protein, 478 aa, Artificial Sequence
  Description of Artificial Sequence: Synthetic polypeptide
  HlyD
MKTWLMGFSEFLLRYKLVWSETWKIRKQLDTPVREKDENEFLPAHLELIETPVSRRPRLVAYFIMGFLVIAVILSVLGQVEIVATANGKLTLSGRSKEIKPIENSIVKEIIVKEGESVRKGDVLLKLTALGAEADTLKTQSSLLQTRLEQTRYQILSRSIELNKLPELKLPDEPYFQNVSEEEVLRLTSLIKEQFSTWQNQKYQKELNLDKKRAERLTILARINRYENLSRVEKSRLDDFRSLLHKQAIAKHAVLEQENKYVEAANELRVYKSQLEQIESEILSAKEEYQLVTQLFKNEILDKLRQTTDNIELLTLELEKNEERQQASVIRAPVSGKVQQLKVHTEGGVVTTAETLMVIVPEDDTLEVTALVQNKDIGFINVGQNAIIKVEAFPYTRYGYLVGKVKNINLDAIEDQKLGLVFNVIVSVEENDLSTGNKHIPLSSGMAVTAEIKTGMRSVISYLLSPLEESVTESLHER

SEQ ID NO: 856 - DNA, 213 bp, Artificial Sequence
  Description of Artificial Sequence: Synthetic polynucleotide
  PfnrS
ggtaccagttgttcttattggtggtgttgctttatggttgcatcgtagtaaatggttgtaacaaaagcaatttttccggctgtctgtatacaaaaacgccgtaaagtttgagcgaagtcaataaactctctacccattcagggcaatatctctcttggatccaaagtgaactctagaaataattttgtttaactttaagaaggagatatacat

SEQ ID NO: 857 - DNA, 1455 bp, Artificial Sequence
  Description of Artificial Sequence: Synthetic polynucleotide
  PfnrS-nupC
ggtaccagttgttcttattggtggtgttgctttatggttgcatcgtagtaaatggttgtaacaaaagcaatttttccggctgtctgtatacaaaaacgccgtaaagtttgagcgaagtcaataaactctctacccattcagggcaatatctctcttggatccaaagtgaactctagaaataattttgtttaactttaagaaggagatatacatgtgcacggaaatttaacctgcctcatatttggagcaaatatggaccgcgtccttcattttgtactggcacttgccgttgttgcgattctcgcactgctggtaagcagcgaccgcaaaaaaattcgtatccgttatgttattcaactgcttgttatcgaagtgttactggcgtggttcttcctgaactccgacgttggtctgggcttcgtgaaaggcttctccgaaatgttcgaaaaactgctcggttttgccaacgaagggactaacttcgtctttggtagcatgaatgatcaaggcctggcattcttcttcctgaaagtgctgtgcccaatcgtctttatctctgcgctgatcggtattctccagcatattcgcgtattgccggtgattatccgcgcaattggtttcctgctctccaaagtcaacggcatgggcaaactggaatcctttaacgccgtcagctccctgattctgggtcagtctgaaaactttattgcctataaagatatcctcggcaaaatctcccgcaatcgtatgtacaccatggcagcaacggcgatgtccaccgtgtcgatgtccatcgttggtgcatatatgaccatgctggagccgaaatacgtcgttgcggcgctggtactgaacatgttcagcacctttatcgtgctgtcgctgatcaacccttaccgtgttgatgccagtgaagaaaacattcagatgtccaacctgcacgaaggtcagagcttcttcgaaatgctgggtgaatacattctggcaggtttcaaagttgccattatcgttgccgcgatgctgatcggctttatcgccctgatcgctgcactgaacgctctgtttgctaccgtgactggctggtttggctacagcatctccttccagggcatcctgggttacatcttctatccgattgcatgggtgatgggtgttccttccagtgaagcactgcaagtgggcagtatcatggcgaccaaactggtttccaacgagttcgttgcgatgatggatctgcagaaaattgcttccacgctctctccgcgtgcggaaggcatcatctctgtgttcctggtttccttcgctaacttctcttcaatcgggattatcgcgggtgcggttaaaggcctgaatgaagagcaaggtaacgtggtttctcgcttcggtctgaaactggtttacggctctaccctggtgagtgtgctgtctgcgtcaatcgcagcactggtgctgtaa

SEQ ID NO: 858 - DNA, 3837 bp, Artificial Sequence
  Description of Artificial Sequence: Synthetic polynucleotide
  PfnrS-xdhABC
ggtaccagttgttcttattggtggtgttgctttatggttgcatcgtagtaaatggttgtaacaaaagcaatttttccggctgtctgtatacaaaaacgccgtaaagtttgagcgaagtcaataaactctctacccattcagggcaatatctctcttggatccaaagtgaactctagaaataattttgtttaactttaagaaggagatatacatatgcgcgtcgatgccattgctaaggtcaccgggcgggcacgatatactgacgattatattatggcgggcatgtgttacgcgaaatatgtacgtagccctatcgcacatggttatgctgtaaatattaatgatgaacaagccaggagtttgccgggcgtcctggcgatttttacctgggaagatgtgccagaaatcccattcgccacggcagggcatgcctggacacttgacgaaaacaagcgcgataccgccgatcgtgccctgctaacgcgtcatgttcgtcatcatggtgacgccgttgccatcgtcgtggcccgcgatgaactcacggcagaaaaagcggcgcaattggtcagcattgagtggcaagaattacccgttatcacctcgccagaagcggcgctggcagaagacgctgcaccaatccataacggtggcaatttactgaaacaaagcacgatgtcgacgggtaatgtccaacaaacaatcgatgccgccgactaccaggtacaggggcactatcagactcccgttattcaacattgtcatatggaaagcgtgacatcgctggcatggatggaggatgactcgcgaattaccatcgtttccagcacccagatcccgcacattgttcgccgcgtggttggtcaggcgctggatattccctggtcatgcgtacgagtcatcaaaccgtttatcggtggcggttttggtaataaacaggatgtactggaagagccaatggcggcattcctgaccagcaaacttggcggcattccggtgaaagtttcccttagccgtgaagagtgtttcctcgcaacccgtacccgccacgcttttactattgacgggcaaatgggcgtgaaccgcgacggaacattgaaaggttatagtctggatgttctgtctaacaccggcgcttatgcatctcacgggcactccattgcttctgctggggggaataaagtcgcttacctttatcctcgttgtgcctacgcttacagttcaaagacctgctataccaacctcccctcggctggtgcgatgcgtggttatggcgcgccacaagtcgtatttgccgttgagtctatgcttgatgatgccgcgacagcgttaggtattgatcctgttgaaattcgtttacgcaacgccgcccgcgaaggagatgctaatccgctcacgggaaaacgtatttacagcgcagggttgccggagtgtcttgaaaaaggccggaaaatctttgaatgggaaaaacgccgtgcagagtgccagaaccagcaaggcaatttacgtcgtggcgttggcgtcgcctgttttagctacacctctaacacctggcctgtcggcgtagaaatagcaggcgcgcgcctgttgatgaatcaggatggaaccatcaacgtgcaaagcggcgcgacggaaatcggccagggtgccgacaccgtgttctcgcaaatggtggcagaaaccgtgggagttccggtcagcgatgttcacgttatttcaacccaagataccgacgttacaccattcgaccccggcgcatttgcctcacgtcagagctatgttgccgcgcctgcgctgcgcagtgcagcactgttattaaaagagaaaatcatcgctcacgccgcagtcatgctacatcagtcagcgatgaatctgaccctgataaaaggccatatcgtgctgattgaaagaccggaagaaccgttaatgtcgttaaaagatttggcgatggacgctttctaccaccctgaacgcggcgggcagctctctgccgaaagctccatcaaaaccaccactaacccaccggcgtttggctgtacctttgttgatctgacggtcgatattgcactgtgcaaagtcaccatcaaccgcatcctcaacgttcatgattcgggccatattcttaatccgctgctggcagaaggtcaggtacacggcggaatgggaatgggcattggctgggcgctatttgaagagatgatcatcgatgcgaaaagcggcgtggtccgtaaccccaatctgctggattacaaaatgccgaccatgccggatctgccacaactggaaagcgcgttcgtcgaaatcaatgagccgcaatcagcatacggacataagtcactgggtgagccccccataattcctgtagccgctgctattcgtaacgcggtgaagatggctaccggtgttgcaatcaatacactgccgctaacgccaaaacgattatatgaagaattccatctggcaggattgatttgaggataacatcatgtttgattttgcttcttaccatcgcgcaaccacccttgccgatgccatcaccctgctggctgacaatccgcaggccaaattgcttgccggtggcactgacgtactgatacagcttcaccatcacaatgaccgctatcgccatattgttgatatccacaatctggcagagcttcagggaataacacaggcggaagatggcgcgctgcgaatcggctctgcgacaacatttactcagctcattgaagatcccgtaatccaacgcaatctcccggcgttatgtgctgcggctgcatcaatcgccgggccgcagatccgtaatgtcgccacctacggcggaaatatttgcaacggtgccaccagcgcagattctgccacgccaacgctaatttatgacgcgaaactggagctccactccccacgcggtgttcgtttcgtcccgattaatggctttcacaccgggccgggcaaagtgtctcttgagcatgacgaaatccttgtcgcctttcattttccgccacagccgaaagaacacgcgggcagcgcgcattttaaatatgccatgcgcgacgcaatggatatttcaacaattggctgcgccgcacattgccgactggataacggcaatttcagcgaattacgcctggcatttggtgttgccgcgccaacgccgattcgctgccaacatgccgaacagactgcacaaaatgcgccattaaacctgcaaacgctggaagccatcagcgaatcagtcctgcaagatgtcgccccgcgttcttcatggcgggccagtaaagagtttcgtctgcatctcatccagacgatgaccaaaaaagtgattagcgaagccgtcgccgcggcggggggaaaattgcaatgaatcacagcgaaacaattaccatcgaatgcaccattaacgggatgccttttcagcttcacgccgcgccaggaatgccgctttcggaactactccgagaacaagggcttcttagtgtcaaacaaggttgctgcgtaggcgaatgcggtgcctgtacggtgctggtcgacggcactgcgatagacagttgcttattccttgcgacctgggctgaaggaaaagagatccgcacgctggaaggtgaagcgaaaggcggtaaactttctcatgtccaactggcttatgcgaaatctggtgcagtgcaatgcgggttttgtacgccgggcctgattatggctaccacggcgatgctggcaaaaccacgcgaaaaaccattaaccattacggaaattcgtcgtggactggcgggaaatctttgtcgctgcacggggtatcagatgattgtaaatacagttctggattgcgagaaaacgaagtaa

SEQ ID NO: 859 - DNA, 3624 bp, Artificial Sequence
  Description of Artificial Sequence: Synthetic polynucleotide
  xdhABC
atgcgcgtcgatgccattgctaaggtcaccgggcgggcacgatatactgacgattatattatggcgggcatgtgttacgcgaaatatgtacgtagccctatcgcacatggttatgctgtaaatattaatgatgaacaagccaggagtttgccgggcgtcctggcgatttttacctgggaagatgtgccagaaatcccattcgccacggcagggcatgcctggacacttgacgaaaacaagcgcgataccgccgatcgtgccctgctaacgcgtcatgttcgtcatcatggtgacgccgttgccatcgtcgtggcccgcgatgaactcacggcagaaaaagcggcgcaattggtcagcattgagtggcaagaattacccgttatcacctcgccagaagcggcgctggcagaagacgctgcaccaatccataacggtggcaatttactgaaacaaagcacgatgtcgacgggtaatgtccaacaaacaatcgatgccgccgactaccaggtacaggggcactatcagactcccgttattcaacattgtcatatggaaagcgtgacatcgctggcatggatggaggatgactcgcgaattaccatcgtttccagcacccagatcccgcacattgttcgccgcgtggttggtcaggcgctggatattccctggtcatgcgtacgagtcatcaaaccgtttatcggtggcggttttggtaataaacaggatgtactggaagagccaatggcggcattcctgaccagcaaacttggcggcattccggtgaaagtttcccttagccgtgaagagtgtttcctcgcaacccgtacccgccacgcttttactattgacgggcaaatgggcgtgaaccgcgacggaacattgaaaggttatagtctggatgttctgtctaacaccggcgcttatgcatctcacgggcactccattgcttctgctggggggaataaagtcgcttacctttatcctcgttgtgcctacgcttacagttcaaagacctgctataccaacctcccctcggctggtgcgatgcgtggttatggcgcgccacaagtcgtatttgccgttgagtctatgcttgatgatgccgcgacagcgttaggtattgatcctgttgaaattcgtttacgcaacgccgcccgcgaaggagatgctaatccgctcacgggaaaacgtatttacagcgcagggttgccggagtgtcttgaaaaaggccggaaaatctttgaatgggaaaaacgccgtgcagagtgccagaaccagcaaggcaatttacgtcgtggcgttggcgtcgcctgttttagctacacctctaacacctggcctgtcggcgtagaaatagcaggcgcgcgcctgttgatgaatcaggatggaaccatcaacgtgcaaagcggcgcgacggaaatcggccagggtgccgacaccgtgttctcgcaaatggtggcagaaaccgtgggagttccggtcagcgatgttcacgttatttcaacccaagataccgacgttacaccattcgaccccggcgcatttgcctcacgtcagagctatgttgccgcgcctgcgctgcgcagtgcagcactgttattaaaagagaaaatcatcgctcacgccgcagtcatgctacatcagtcagcgatgaatctgaccctgataaaaggccatatcgtgctgattgaaagaccggaagaaccgttaatgtcgttaaaagatttggcgatggacgctttctaccaccctgaacgcggcgggcagctctctgccgaaagctccatcaaaaccaccactaacccaccggcgtttggctgtacctttgttgatctgacggtcgatattgcactgtgcaaagtcaccatcaaccgcatcctcaacgttcatgattcgggccatattcttaatccgctgctggcagaaggtcaggtacacggcggaatgggaatgggcattggctgggcgctatttgaagagatgatcatcgatgcgaaaagcggcgtggtccgtaaccccaatctgctggattacaaaatgccgaccatgccggatctgccacaactggaaagcgcgttcgtcgaaatcaatgagccgcaatcagcatacggacataagtcactgggtgagccccccataattcctgtagccgctgctattcgtaacgcggtgaagatggctaccggtgttgcaatcaatacactgccgctaacgccaaaacgattatatgaagaattccatctggcaggattgatttgaggataacatcatgtttgattttgcttcttaccatcgcgcaaccacccttgccgatgccatcaccctgctggctgacaatccgcaggccaaattgcttgccggtggcactgacgtactgatacagcttcaccatcacaatgaccgctatcgccatattgttgatatccacaatctggcagagcttcagggaataacacaggcggaagatggcgcgctgcgaatcggctctgcgacaacatttactcagctcattgaagatcccgtaatccaacgcaatctcccggcgttatgtgctgcggctgcatcaatcgccgggccgcagatccgtaatgtcgccacctacggcggaaatatttgcaacggtgccaccagcgcagattctgccacgccaacgctaatttatgacgcgaaactggagctccactccccacgcggtgttcgtttcgtcccgattaatggctttcacaccgggccgggcaaagtgtctcttgagcatgacgaaatccttgtcgcctttcattttccgccacagccgaaagaacacgcgggcagcgcgcattttaaatatgccatgcgcgacgcaatggatatttcaacaattggctgcgccgcacattgccgactggataacggcaatttcagcgaattacgcctggcatttggtgttgccgcgccaacgccgattcgctgccaacatgccgaacagactgcacaaaatgcgccattaaacctgcaaacgctggaagccatcagcgaatcagtcctgcaagatgtcgccccgcgttcttcatggcgggccagtaaagagtttcgtctgcatctcatccagacgatgaccaaaaaagtgattagcgaagccgtcgccgcggcggggggaaaattgcaatgaatcacagcgaaacaattaccatcgaatgcaccattaacgggatgccttttcagcttcacgccgcgccaggaatgccgctttcggaactactccgagaacaagggcttcttagtgtcaaacaaggttgctgcgtaggcgaatgcggtgcctgtacggtgctggtcgacggcactgcgatagacagttgcttattccttgcgacctgggctgaaggaaaagagatccgcacgctggaaggtgaagcgaaaggcggtaaactttctcatgtccaactggcttatgcgaaatctggtgcagtgcaatgcgggttttgtacgccgggcctgattatggctaccacggcgatgctggcaaaaccacgcgaaaaaccattaaccattacggaaattcgtcgtggactggcgggaaatctttgtcgctgcacggggtatcagatgattgtaaatacagttctggattgcgagaaaacgaagtaa

SEQ ID NO: 860 - DNA, 2803 bp, Artificial Sequence
  Description of Artificial Sequence: Synthetic polynucleotide
  PfnrS-add-xapA-deoD
ggtaccagttgttcttattggtggtgttgctttatggttgcatcgtagtaaatggttgtaacaaaagcaatttttccggctgtctgtatacaaaaacgccgtaaagtttgagcgaagtcaataaactctctacccattcagggcaatatctctcttggatccaaagtgaactctagaaataattttgtttaactttaagaaggagatatacatatgattgataccaccctgccattaactgatatccatcgccaccttgatggcaacattcgtccccagaccattcttgaacttggccgccagtataatatctcgcttcctgcacaatccctggaaacactgattccccacgttcaggtcattgccaacgaacccgatctggtgagctttctgactaaacttgactggggcgttaaagttctcgcctctcttgatgcctgccgccgcgtggcatttgaaaacattgaagatgcagcccgtaacggcctgcactatgtcgagctgcgtttttcaccaggctacatggcaatggcacatcagctgcctgtagcgggtgttgtcgaagcggtgatcgatggcgtacgtgaaggttgccgcacctttggtgtgcaggcgaagcttatcggtattatgagccggaccttcggcgaagccgcctgtcagcaagagctggaggcctttttagcccaccgtgaccagattaccgcacttgatttagccggtgatgaacttggtttcccgggaagtctgttcctttctcatttcaaccgcgcgcgtgatgcgggctggcatattaccgtccatgcaggcgaagctgccggaccggaaagcatctggcaggcgattcgtgaactgggggcggagcgtattggacatggcgtaaaagccattgaagatcgggcgctgatggattttctcgccgagcaacaaattggtattgaatcctgtctgacctccaatattcagaccagcaccgtggcggatctggctgcacatccgctgaaaacgttccttgagcatggcattcgtgccagcattaacactgacgatccaggcgtgcagggagtggatatcattcacgaatataccgttgccgcgccagctgctgggttatcccgcgagcaaatccgccaggcacagattaatggtctggaaatggctttcctcagcgcagaggaaaaacgcgcactgcgagaaaaagtcgccgcgaagtaaaagaaggagatatacatatgtatcaggctcagttttctcataacccactgtattgcgtagatattatcaagacttataaacctgatttcacgccacgagtggcctttattttaggttccgggctgggcgcgctggccgatcagattgagaacgcggtcgcaatttcctacgaaaagctgcctgggttcccggtaagtaccgtacacggtcatgcgggtgagctggtgctgggttatctccagggggtgccagtggcgtgtatgaaaggtcgcggacatttctacgaaggtcgtgggatgaccatcatgacggatgcaatccgtacctttaagttgctgggctgcgagttgctgttctgcaccaatgcggctggctcactgcgccctgaagtgggggccggcagtctggtcgcattgaaagatcacatcaacaccatgccgggaacgccgatggtgggtcttaatgatgaacgttttggtgagcgcttcttctcgctggcgaatgcctacgatgcggaataccgcgcactgttacaaaaagtggcgaaagaagaggggttccctctgacggagggcgtgttcgtctcatatccggggccgaatttcgagactgcggcggaaattcgcatgatgcaaattattggtggggatgttgttggtatgtctgtggtgcctgaggttatttcagctcgccattgcgaacttaaagtcgttgcggtctctgcgattaccaacatggcggaaggtctgagtgacgtgaagctttctcatgcccaaacgctggcagcagcggaactctcaaagcaaaactttattaatcttatttgcggctttctgcgcaaaattgcctgaaagaaggagatatacatatggctaccccacacattaatgcagaaatgggcgatttcgctgacgtagttttgatgccaggcgacccgctgcgtgcgaagtatattgctgaaactttccttgaagatgcccgtgaagtgaacaacgttcgcggtatgctgggcttcaccggtacttacaaaggccgcaaaatttccgtaatgggtcacggtatgggtatcccgtcctgctccatctacaccaaagaactgatcaccgatttcggcgtgaagaaaattatccgcgtgggttcctgtggcgcagttctgccgcacgtaaaactacgcgacgtcgttatcggtatgggtgcctgcaccgattccaaagttaaccgcatccgttttaaagaccatgactttgccgctatcgctgactttgacatggtgcgtaacgcggtagacgcggctaaagcactgggcgttgatgctcgcgtgggtaacctgttctccgctgacctgttctactctccggacggcgaaatgttcgacgtgatggaaaaatacggcatcctcggcgtggaaatggaagcggctggtatctacggcgtcgctgcagaatttggcgcgaaagccctgaccatctgcaccgtgtctgaccacatccgcactcacgagcagaccactgccgctgagcgtcagaccaccttcaacgacatgatcaaaatcgcactggaatccgttctgctgggcgataaagagtaa

SEQ ID NO: 861 - DNA, 2633 bp, Artificial Sequence
  Description of Artificial Sequence: Synthetic polynucleotide
  add-xapA-deoD
ctctagaaataattttgtttaactttaagaaggagatatacatatgattgataccaccctgccattaactgatatccatcgccaccttgatggcaacattcgtccccagaccattcttgaacttggccgccagtataatatctcgcttcctgcacaatccctggaaacactgattccccacgttcaggtcattgccaacgaacccgatctggtgagctttctgactaaacttgactggggcgttaaagttctcgcctctcttgatgcctgccgccgcgtggcatttgaaaacattgaagatgcagcccgtaacggcctgcactatgtcgagctgcgtttttcaccaggctacatggcaatggcacatcagctgcctgtagcgggtgttgtcgaagcggtgatcgatggcgtacgtgaaggttgccgcacctttggtgtgcaggcgaagcttatcggtattatgagccggaccttcggcgaagccgcctgtcagcaagagctggaggcctttttagcccaccgtgaccagattaccgcacttgatttagccggtgatgaacttggtttcccgggaagtctgttcctttctcatttcaaccgcgcgcgtgatgcgggctggcatattaccgtccatgcaggcgaagctgccggaccggaaagcatctggcaggcgattcgtgaactgggggcggagcgtattggacatggcgtaaaagccattgaagatcgggcgctgatggattttctcgccgagcaacaaattggtattgaatcctgtctgacctccaatattcagaccagcaccgtggcggatctggctgcacatccgctgaaaacgttccttgagcatggcattcgtgccagcattaacactgacgatccaggcgtgcagggagtggatatcattcacgaatataccgttgccgcgccagctgctgggttatcccgcgagcaaatccgccaggcacagattaatggtctggaaatggctttcctcagcgcagaggaaaaacgcgcactgcgagaaaaagtcgccgcgaagtaaaagaaggagatatacatatgtatcaggctcagttttctcataacccactgtattgcgtagatattatcaagacttataaacctgatttcacgccacgagtggcctttattttaggttccgggctgggcgcgctggccgatcagattgagaacgcggtcgcaatttcctacgaaaagctgcctgggttcccggtaagtaccgtacacggtcatgcgggtgagctggtgctgggttatctccagggggtgccagtggcgtgtatgaaaggtcgcggacatttctacgaaggtcgtgggatgaccatcatgacggatgcaatccgtacctttaagttgctgggctgcgagttgctgttctgcaccaatgcggctggctcactgcgccctgaagtgggggccggcagtctggtcgcattgaaagatcacatcaacaccatgccgggaacgccgatggtgggtcttaatgatgaacgttttggtgagcgcttcttctcgctggcgaatgcctacgatgcggaataccgcgcactgttacaaaaagtggcgaaagaagaggggttccctctgacggagggcgtgttcgtctcatatccggggccgaatttcgagactgcggcggaaattcgcatgatgcaaattattggtggggatgttgttggtatgtctgtggtgcctgaggttatttcagctcgccattgcgaacttaaagtcgttgcggtctctgcgattaccaacatggcggaaggtctgagtgacgtgaagctttctcatgcccaaacgctggcagcagcggaactctcaaagcaaaactttattaatcttatttgcggctttctgcgcaaaattgcctgaaagaaggagatatacatatggctaccccacacattaatgcagaaatgggcgatttcgctgacgtagttttgatgccaggcgacccgctgcgtgcgaagtatattgctgaaactttccttgaagatgcccgtgaagtgaacaacgttcgcggtatgctgggcttcaccggtacttacaaaggccgcaaaatttccgtaatgggtcacggtatgggtatcccgtcctgctccatctacaccaaagaactgatcaccgatttcggcgtgaagaaaattatccgcgtgggttcctgtggcgcagttctgccgcacgtaaaactacgcgacgtcgttatcggtatgggtgcctgcaccgattccaaagttaaccgcatccgttttaaagaccatgactttgccgctatcgctgactttgacatggtgcgtaacgcggtagacgcggctaaagcactgggcgttgatgctcgcgtgggtaacctgttctccgctgacctgttctactctccggacggcgaaatgttcgacgtgatggaaaaatacggcatcctcggcgtggaaatggaagcggctggtatctacggcgtcgctgcagaatttggcgcgaaagccctgaccatctgcaccgtgtctgaccacatccgcactcacgagcagaccactgccgctgagcgtcagaccaccttcaacgacatgatcaaaatcgcactggaatccgttctgctgggcgataaagagtaa

SEQ ID NO: 862 - DNA, 1053 bp, Artificial Sequence
  Description of Artificial Sequence: Synthetic polynucleotide
  fbrAroG
atgaattatcagaacgacgatttacgcatcaaagaaatcaaagagttacttcctcctgtcgcattgctggaaaaattccccgctactgaaaatgccgcgaatacggtcgcccatgcccgaaaagcgatccataagatcctgaaaggtaatgatgatcgcctgttggtggtgattggcccatgctcaattcatgatcctgtcgcggctaaagagtatgccactcgcttgctgacgctgcgtgaagagctgcaagatgagctggaaatcgtgatgcgcgtctattttgaaaagccgcgtactacggtgggctggaaagggctgattaacgatccgcatatggataacagcttccagatcaacgacggtctgcgtattgcccgcaaattgctgctcgatattaacgacagcggtctgccagcggcgggtgaattcctggatatgatcaccctacaatatctcgctgacctgatgagctggggcgcaattggcgcacgtaccaccgaatcgcaggtgcaccgcgaactggcgtctggtctttcttgtccggtaggtttcaaaaatggcactgatggtacgattaaagtggctatcgatgccattaatgccgccggtgcgccgcactgcttcctgtccgtaacgaaatgggggcattcggcgattgtgaataccagcggtaacggcgattgccatatcattctgcgcggcggtaaagagcctaactacagcgcgaagcacgttgctgaagtgaaagaagggctgaacaaagcaggcctgccagcgcaggtgatgatcgatttcagccatgctaactcgtcaaaacaattcaaaaagcagatggatgtttgtactgacgtttgccagcagattgccggtggcgaaaaggccattattggcgtgatggtggaaagccatctggtggaaggcaatcagagcctcgagagcggggaaccgctggcctacggtaagagcatcaccgatgcctgcattggctgggatgataccgatgctctgttacgtcaactggcgagtgcagtaaaagcgcgtcgcgggtaa

SEQ ID NO: 863 - DNA, 2351 bp, Artificial Sequence
  Description of Artificial Sequence: Synthetic polynucleotide
  fbrAroG-serA
ctctagaaataattttgtttaactttaagaaggagatatacatatgaattatcagaacgacgatttacgcatcaaagaaatcaaagagttacttcctcctgtcgcattgctggaaaaattccccgctactgaaaatgccgcgaatacggtcgcccatgcccgaaaagcgatccataagatcctgaaaggtaatgatgatcgcctgttggtggtgattggcccatgctcaattcatgatcctgtcgcggctaaagagtatgccactcgcttgctgacgctgcgtgaagagctgcaagatgagctggaaatcgtgatgcgcgtctattttgaaaagccgcgtactacggtgggctggaaagggctgattaacgatccgcatatggataacagcttccagatcaacgacggtctgcgtattgcccgcaaattgctgctcgatattaacgacagcggtctgccagcggcgggtgaattcctggatatgatcaccctacaatatctcgctgacctgatgagctggggcgcaattggcgcacgtaccaccgaatcgcaggtgcaccgcgaactggcgtctggtctttcttgtccggtaggtttcaaaaatggcactgatggtacgattaaagtggctatcgatgccattaatgccgccggtgcgccgcactgcttcctgtccgtaacgaaatgggggcattcggcgattgtgaataccagcggtaacggcgattgccatatcattctgcgcggcggtaaagagcctaactacagcgcgaagcacgttgctgaagtgaaagaagggctgaacaaagcaggcctgccagcgcaggtgatgatcgatttcagccatgctaactcgtcaaaacaattcaaaaagcagatggatgtttgtactgacgtttgccagcagattgccggtggcgaaaaggccattattggcgtgatggtggaaagccatctggtggaaggcaatcagagcctcgagagcggggaaccgctggcctacggtaagagcatcaccgatgcctgcattggctgggatgataccgatgctctgttacgtcaactggcgagtgcagtaaaagcgcgtcgcgggtaatacttaagaaggagatatacatatggcaaaggtatcgctggagaaagacaagattaagtttctgctggtagaaggcgtgcaccaaaaggcgctggaaagccttcgtgcagctggttacaccaacatcgaatttcacaaaggcgcgctggatgatgaacaattaaaagaatccatccgcgatgcccacttcatcggcctgcgatcccgtacccatctgactgaagacgtgatcaacgccgcagaaaaactggtcgctattggctgtttctgtatcggaacaaatcaggttgatctggatgcggcggcaaagcgcgggatcccggtatttaacgcaccgttctcaaatacgcgctctgttgcggagctggtgattggcgaactgctgctgctattgcgcggcgtgccagaagccaatgctaaagcgcatcgtggcgtgtggaacaaactggcggcgggttcttttgaagcgcgcggcaaaaagctgggtatcatcggctacggtcatattggtacgcaattgggcattctggctgaatcgctgggaatgtatgtttacttttatgatattgaaaacaaactgccgctgggcaacgccactcaggtacagcatctttctgacctgctgaatatgagcgatgtggtgagtctgcatgtaccagagaatccgtccaccaaaaatatgatgggcgcgaaagagatttcgctaatgaagcccggctcgctgctgattaatgcttcgcgcggtactgtggtggatattccagcgctgtgtgacgcgctggcgagcaaacatctggcgggggcggcaatcgacgtattcccgacggaaccggcgaccaatagcgatccatttacctctccgctgtgtgaattcgacaatgtccttctgacgccacacattggcggttcgactcaggaagcgcaggagaatatcggcttggaagttgcgggtaaattgatcaagtattctgacaatggctcaacgctctctgcggtgaacttcccggaagtctcgctgccactgcacggtgggcgtcgtctgatgcacatccacgaaaaccgtccgggcgtgctaactgcgctcaacaaaatttttgccgagcagggcgtcaacatcgccgcgcaatatctacaaacttccgcccagatgggttatgtagttattgatattgaagccgacgaagacgttgccgaaaaagcgctgcaggcaatgaaagctattccgggtaccattcgcgcccgtctgctgtactaa

SEQ ID NO: 864 - DNA, 1233 bp, Artificial Sequence
  Description of Artificial Sequence: Synthetic polynucleotide
  SerA
atggcaaaggtatcgctggagaaagacaagattaagtttctgctggtagaaggcgtgcaccaaaaggcgctggaaagccttcgtgcagctggttacaccaacatcgaatttcacaaaggcgcgctggatgatgaacaattaaaagaatccatccgcgatgcccacttcatcggcctgcgatcccgtacccatctgactgaagacgtgatcaacgccgcagaaaaactggtcgctattggctgtttctgtatcggaacaaatcaggttgatctggatgcggcggcaaagcgcgggatcccggtatttaacgcaccgttctcaaatacgcgctctgttgcggagctggtgattggcgaactgctgctgctattgcgcggcgtgccagaagccaatgctaaagcgcatcgtggcgtgtggaacaaactggcggcgggttcttttgaagcgcgcggcaaaaagctgggtatcatcggctacggtcatattggtacgcaattgggcattctggctgaatcgctgggaatgtatgtttacttttatgatattgaaaacaaactgccgctgggcaacgccactcaggtacagcatctttctgacctgctgaatatgagcgatgtggtgagtctgcatgtaccagagaatccgtccaccaaaaatatgatgggcgcgaaagagatttcgctaatgaagcccggctcgctgctgattaatgcttcgcgcggtactgtggtggatattccagcgctgtgtgacgcgctggcgagcaaacatctggcgggggcggcaatcgacgtattcccgacggaaccggcgaccaatagcgatccatttacctctccgctgtgtgaattcgacaatgtccttctgacgccacacattggcggttcgactcaggaagcgcaggagaatatcggcttggaagttgcgggtaaattgatcaagtattctgacaatggctcaacgctctctgcggtgaacttcccggaagtctcgctgccactgcacggtgggcgtcgtctgatgcacatccacgaaaaccgtccgggcgtgctaactgcgctcaacaaaatttttgccgagcagggcgtcaacatcgccgcgcaatatctacaaacttccgcccagatgggttatgtagttattgatattgaagccgacgaagacgttgccgaaaaagcgctgcaggcaatgaaagctattccgggtaccattcgcgcccgtctgctgtactaa

SEQ ID NO: 865 - DNA, 1424 bp, Artificial Sequence
  Description of Artificial Sequence: Synthetic polynucleotide
  Ptet-kynU(Pseudomonas)
atctaatctagacatcattaattcctaatttttgttgacactctatcattgatagagttattttaccactccctatcagtgatagagaaaagtgaattatataaaagtgggaggtgcccgaatgacgacccgaaatgattgcctagcgttggatgcacaggacagtctggctccgctgcgccaacaatttgcgctgccggagggtgtgatatacctggatggcaattcgctgggcgcacgtccggtagctgcgctggctcgcgcgcaggctgtgatcgcagaagaatggggcaacgggttgatccgttcatggaactctgcgggctggcgtgatctgtctgaacgcctgggtaatcgcctggctaccctgattggtgcgcgcgatggggaagtagttgttactgataccacctcgattaatctgtttaaagtgctgtcagcggcgctgcgcgtgcaagctacccgtagcccggagcgccgtgttatcgtgactgagacctcgaatttcccgaccgacctgtatattgcggaagggttggcggatatgctgcaacaaggttacactctgcgtttggtggattcaccggaagagctgccacaggctatagatcaggacaccgcggtggtgatgctgacgcacgtaaattataaaaccggttatatgcacgacatgcaggctctgaccgcgttgagccacgagtgtggggctctggcgatttgggatctggcgcactctgctggcgctgtgccggtggacctgcaccaagcgggcgcggactatgcgattggctgcacgtacaaatacctgaatggcggcccgggttcgcaagcgtttgtttgggtttcgccgcaactgtgcgacctggtaccgcagccgctgtctggttggttcggccatagtcgccaattcgcgatggagccgcgctacgaaccttctaacggcattgctcgctatctgtgcggcactcagcctattactagcttggctatggtggagtgcggcctggatgtgtttgcgcagacggatatggcttcgctgcgccgtaaaagtctggcgctgactgatctgttcatcgagctggttgaacaacgctgcgctgcacacgaactgaccctggttactccacgtgaacacgcgaaacgcggctctcacgtgtcttttgaacaccccgagggttacgctgttattcaagctctgattgatcgtggcgtgatcggcgattaccgtgagccacgtattatgcgtttcggtttcactcctctgtatactacttttacggaagtttgggatgcagtacaaatcctgggcgaaatcctggatcgtaagacttgggcgcaggctcagtttcaggtgcgccactctgttacttaaaaataaaacgaaaggctcagtcgaaagactgggcctttcgttttatctgttg

SEQ ID NO: 866 - DNA, 1571 bp, Artificial Sequence
  Description of Artificial Sequence: Synthetic polynucleotide
  Ptet-kynU(Human)
atctaatctagacatcattaattcctaatttttgttgacactctatcattgatagagttattttaccactccctatcagtgatagagaaaagtgaatatcaagacacgaggaggtaagattatggagccttcatctttagaactgccagcggacacggtgcagcgcatcgcggcggaactgaagtgccatccgactgatgagcgtgtggcgctgcatctggacgaagaagataaactgcgccactttcgtgaatgtttttatattcctaaaattcaagacttgccgccggtagatttgagtctcgttaacaaagatgaaaacgcgatctactttctgggcaactctctgggtctgcaaccaaaaatggttaaaacgtacctggaggaagaactggataaatgggcaaaaatcgcggcttatggtcacgaagtgggcaagcgtccttggattactggcgacgagtctattgtgggtttgatgaaagatattgtgggcgcgaatgaaaaggaaattgcactgatgaatgctctgaccgttaatctgcacctgctgatgctgtctttttttaaaccgaccccgaaacgctacaaaatactgctggaagcgaaagcgtttccgtcggatcactatgctatagaaagtcaactgcagttgcatggtctgaatatcgaggaatctatgcgcatgattaaaccgcgtgagggtgaagaaacgctgcgtattgaagacattctggaagttattgaaaaagaaggtgattctatcgcagttatactgttttctggcgtgcacttttatacaggtcagcacttcaatatcccggcaatcactaaagcggggcaggcaaaaggctgctatgttggttttgacctggcgcatgcagtggggaatgttgaactgtatctgcacgattggggcgttgatttcgcgtgttggtgtagctacaaatatctgaacgctggcgcgggtggcattgctggcgcttttattcacgaaaaacacgcgcacaccattaaaccggctctggttggctggttcggtcatgagctgagtactcgctttaaaatggataacaaactgcaattgattccgggtgtttgcggcttccgtatcagcaatccgccgattctgctggtttgcagcctgcacgctagtctggaaatctttaagcaggcgactatgaaagcgctgcgcaaaaaatctgtgctgctgaccggctatctggagtatctgatcaaacacaattatggcaaagataaagctgcaactaaaaaaccggtagtgaacattatcaccccctcacacgtggaggagcgcggttgtcagctgactattactttcagtgtacctaataaagatgtgttccaggaactggaaaaacgcggcgttgtttgtgataaacgtaacccgaatggtattcgcgtggctcctgtgccgctgtacaattcattccacgatgtttataaattcaccaacctgctgacttctattctcgacagtgctgagactaaaaattaaaaataaaacgaaaggctcagtcgaaagactgggcctttcgttttatctgttg

SEQ ID NO: 867 - DNA, 1310 bp, Artificial Sequence
  Description of Artificial Sequence: Synthetic polynucleotide
  ptet-kynU(Shewanella)
atctaatctagacatcattaattcctaatttttgttgacactctatcattgatagagttattttaccactccctatcagtgatagagaaaagtgaatggttcaccaccacaaggagggattatgctgctgaatgtaaaacaggacttttgcctggcaggcccgggctacctgctgaatcactcggttggccgtccgctgaaatcaactgagcaagcgctgaaacaagcattttttgctccgtggcaagagagcggtcgtgaaccgtggggccagtggctgggtgttattgataatttcactgctgcgctggcatctctgtttaatggtcaaccgcaggatttttgtccgcaggttaacctgagcagcgcgctgactaaaattgtgatgtcactggatcgtctgactcgcgatctgacccgcaatggcggtgctgttgtgctgatgtctgaaatcgatttcccatctatgggcttcgcgttgaaaaaagcgctgccagcgagctgcgaactgcgttttatcccgaaaagtctggacgtgactgatccgaacgtatgggatgcacacatctgtgatgatgtagacctggtttttgtgtctcacgcctatagtaatacgggccaacaggctccgctggcgcaaatcatctctctggcgcgtgaacgtggctgcctgtcactggtggatgtagcgcaatcagcggggattttgccgctggatctggcgaaactgcaaccggacttcatgatcggcagttcggttaaatggctgtgctcgggccctggtgcggcatatctgtgggttaatccggcgattctgccggaatgtcagccgcaggatgtgggctggttttcacatgagaatccctttgaattcgacatccacgatttccgctaccacccgactgcactgcgcttttggggtggtacgccgtcgatcgcgccttatgcgatcgcggcgcactcgatcgaatattttgccaatatcggctcgcaagtgatgcgtgaacacaacctgcaactgatggaaccggtggttcaggcgctggacaatgaactggtgagcccgcaggaagtggataaacgctcaggcactattattctgcaattcggtgaacgtcaaccgcaaattctggcggctctggctgcggcgaacatttcggtggacactcgttctttggggattcgtgttagtccgcacatttataatgatgaggcggacattgcgcgcctgctgggtgtgatcaaagcaaatcgctaaaaataaaacgaaaggctcagtcgaaagactgggcctttcgttttatctgttg

SEQ ID NO: 868 - DNA, 1096 bp, Artificial Sequence
  Description of Artificial Sequence: Synthetic polynucleotide
  fbrAroG
ctctagaaataattttgtttaactttaagaaggagatatacatatgaattatcagaacgacgatttacgcatcaaagaaatcaaagagttacttcctcctgtcgcattgctggaaaaattccccgctactgaaaatgccgcgaatacggtcgcccatgcccgaaaagcgatccataagatcctgaaaggtaatgatgatcgcctgttggtggtgattggcccatgctcaattcatgatcctgtcgcggctaaagagtatgccactcgcttgctgacgctgcgtgaagagctgcaagatgagctggaaatcgtgatgcgcgtctattttgaaaagccgcgtactacggtgggctggaaagggctgattaacgatccgcatatggataacagcttccagatcaacgacggtctgcgtattgcccgcaaattgctgctcgatattaacgacagcggtctgccagcggcgggtgaattcctggatatgatcaccctacaatatctcgctgacctgatgagctggggcgcaattggcgcacgtaccaccgaatcgcaggtgcaccgcgaactggcgtctggtctttcttgtccggtaggtttcaaaaatggcactgatggtacgattaaagtggctatcgatgccattaatgccgccggtgcgccgcactgcttcctgtccgtaacgaaatgggggcattcggcgattgtgaataccagcggtaacggcgattgccatatcattctgcgcggcggtaaagagcctaactacagcgcgaagcacgttgctgaagtgaaagaagggctgaacaaagcaggcctgccagcgcaggtgatgatcgatttcagccatgctaactcgtcaaaacaattcaaaaagcagatggatgtttgtactgacgtttgccagcagattgccggtggcgaaaaggccattattggcgtgatggtggaaagccatctggtggaaggcaatcagagcctcgagagcggggaaccgctggcctacggtaagagcatcaccgatgcctgcattggctgggatgataccgatgctctgttacgtcaactggcgagtgcagtaaaagcgcgtcgcgggtaa

SEQ ID NO: 869 - DNA, 28 bp, Artificial Sequence
  Description of Artificial Sequence: Synthetic oligonucleotide
  BBa_J61133
tctagagaaagacccgagacactagatg

SEQ ID NO: 870 - DNA, 28 bp, Artificial Sequence
  Description of Artificial Sequence: Synthetic oligonucleotide
  BBa_J61134
tctagagaaagaccggaaatactagatg

SEQ ID NO: 871 - DNA, 28 bp, Artificial Sequence
  Description of Artificial Sequence: Synthetic oligonucleotide
  BBa_J61135
tctagagaaagaccggagacactagatg

SEQ ID NO: 872 - DNA, 6573 bp, Artificial Sequence
  Description of Artificial Sequence: Synthetic polynucleotide
  TrpEDCBA
ctctagaaataattttgtttaactttaagaaggagatatacatatgcaaacacaaaaaccgactctcgaactgctaacctgcgaaggcgcttatcgcgacaacccgactgcgctttttcaccagttgtgtggggatcgtccggcaacgctgctgctggaatccgcagatatcgacagcaaagatgatttaaaaagcctgctgctggtagacagtgcgctgcgcattacagcattaagtgacactgtcacaatccaggcgctttccggcaatggagaagccctgttgacactactggataacgccttgcctgcgggtgtggaaaatgaacaatcaccaaactgccgcgtactgcgcttcccgcctgtcagtccactgctggatgaagacgcccgcttatgctccctttcggtttttgacgctttccgcttattacagaatctgttgaatgtaccgaaggaagaacgagaagcaatgttcttcggcggcctgttctcttatgaccttgtggcgggatttgaaaatttaccgcaactgtcagcggaaaatagctgccctgatttctgtttttatctcgctgaaacgctgatggtgattgaccatcagaaaaaaagcactcgtattcaggccagcctgtttgctccgaatgaagaagaaaaacaacgtctcactgctcgcctgaacgaactacgtcagcaactgaccgaagccgcgccgccgctgccggtggtttccgtgccgcatatgcgttgtgaatgtaaccagagcgatgaagagttcggtggtgtagtgcgtttgttgcaaaaagcgattcgcgccggagaaattttccaggtggtgccatctcgccgtttctctctgccctgcccgtcaccgctggcagcctattacgtgctgaaaaagagtaatcccagcccgtacatgttttttatgcaggataatgatttcaccctgtttggcgcgtcgccggaaagttcgctcaagtatgacgccaccagccgccagattgagatttacccgattgccggaacacgtccacgcggtcgtcgtgccgatggttcgctggacagagacctcgacagccgcatcgaactggagatgcgtaccgatcataaagagctttctgaacatctgatgctggtggatctcgcccgtaatgacctggcacgcatttgcacacccggcagccgctacgtcgccgatctcaccaaagttgaccgttactcttacgtgatgcacctagtctcccgcgttgttggtgagctgcgccacgatctcgacgccctgcacgcttaccgcgcctgtatgaatatggggacgttaagcggtgcaccgaaagtacgcgctatgcagttaattgccgaagcagaaggtcgtcgacgcggcagctacggcggcgcggtaggttattttaccgcgcatggcgatctcgacacctgcattgtgatccgctcggcgctggtggaaaacggtatcgccaccgtgcaagccggtgctggcgtagtccttgattctgttccgcagtcggaagccgacgaaactcgtaataaagcccgcgctgtactgcgcgctattgccaccgcgcatcatgcacaggagacgttctaatggctgacattctgctgctcgataatatcgactcttttacgtacaacctggcagatcagttgcgcagcaatggtcataacgtggtgatttaccgcaaccatattccggcgcagaccttaattgaacgcctggcgacgatgagcaatccggtgctgatgctttctcctggccccggtgtgccgagcgaagccggttgtatgccggaactcctcacccgcttgcgtggcaagctgccaattattggcatttgcctcggacatcaggcgattgtcgaagcttacgggggctatgtcggtcaggcgggcgaaattcttcacggtaaagcgtcgagcattgaacatgacggtcaggcgatgtttgccggattaacaaacccgctgccagtggcgcgttatcactcgctggttggcagtaacattccggccggtttaaccatcaacgcccattttaatggcatggtgatggcggtgcgtcacgatgcagatcgcgtttgtggattccagttccatccggaatccattcttactacccagggcgctcgcctgctggaacaaacgctggcctgggcgcagcagaaactagagccaaccaacacgctgcaaccgattctggaaaaactgtatcaggcacagacgcttagccaacaagaaagccaccagctgttttcagcggtggtacgtggcgagctgaagccggaacaactggcggcggcgctggtgagcatgaaaattcgcggtgaacacccgaacgagatcgccggggcagcaaccgcgctactggaaaacgccgcgccattcccgcgcccggattatctgtttgccgatatcgtcggtactggcggtgacggcagcaacagcatcaatatttctaccgccagtgcgtttgtcgccgcggcctgcgggctgaaagtggcgaaacacggcaaccgtagcgtctccagtaaatccggctcgtcggatctgctggcggcgttcggtattaatcttgatatgaacgccgataaatcgcgccaggcgctggatgagttaggcgtctgtttcctctttgcgccgaagtatcacaccggattccgccatgcgatgccggttcgccagcaactgaaaacccgcactctgttcaacgtgctgggaccattgattaacccggcgcatccgccgctggcgctaattggtgtttatagtccggaactggtgctgccgattgccgaaaccttgcgcgtgctggggtatcaacgcgcggcagtggtgcacagcggcgggatggatgaagtttcattacacgcgccgacaatcgttgccgaactacatgacggcgaaattaagagctatcaattgaccgctgaagattttggcctgacaccctaccaccaggagcaattggcaggcggaacaccggaagaaaaccgtgacattttaacacgcttgttacaaggtaaaggcgacgccgcccatgaagcagccgtcgcggcgaatgtcgccatgttaatgcgcctgcatggccatgaagatctgcaagccaatgcgcaaaccgttcttgaggtactgcgcagtggttccgcttacgacagagtcaccgcactggcggcacgagggtaaatgatgcaaaccgttttagcgaaaatcgtcgcagacaaggcgatttgggtagaaacccgcaaagagcagcaaccgctggccagttttcagaatgaggttcagccgagcacgcgacatttttatgatgcacttcagggcgcacgcacggcgtttattctggagtgtaaaaaagcgtcgccgtcaaaaggcgtgatccgtgatgatttcgatccggcacgcattgccgccatttataaacattacgcttcggcaatttcagtgctgactgatgagaaatattttcaggggagctttgatttcctccccatcgtcagccaaatcgccccgcagccgattttatgtaaagacttcattatcgatccttaccagatctatctggcgcgctattaccaggccgatgcctgcttattaatgctttcagtactggatgacgaacaatatcgccagcttgcagccgtcgcccacagtctggagatgggtgtgctgaccgaagtcagtaatgaagaggaactggagcgcgccattgcattgggggcaaaggtcgttggcatcaacaaccgcgatctgcgcgatttgtcgattgatctcaaccgtacccgcgagcttgcgccgaaactggggcacaacgtgacggtaatcagcgaatccggcatcaatacttacgctcaggtgcgcgagttaagccacttcgctaacggctttctgattggttcggcgttgatggcccatgacgatttgaacgccgccgtgcgtcgggtgttgctgggtgagaataaagtatgtggcctgacacgtgggcaagatgctaaagcagcttatgacgcgggcgcgatttacggtgggttgatttttgttgcgacatcaccgcgttgcgtcaacgttgaacaggcgcaggaagtgatggctgcagcaccgttgcagtatgttggcgtgttccgcaatcacgatattgccgatgtggcggacaaagctaaggtgttatcgctggcggcagtgcaactgcatggtaatgaagatcagctgtatatcgacaatctgcgtgaggctctgccagcacacgtcgccatctggaaggctttaagtgtcggtgaaactcttcccgcgcgcgattttcagcacatcgataaatatgtattcgacaacggtcagggcgggagcggacaacgtttcgactggtcactattaaatggtcaatcgcttggcaacgttctgctggcggggggcttaggcgcagataactgcgtggaagcggcacaaaccggctgcgccgggcttgattttaattctgctgtagagtcgcaaccgggtatcaaagacgcacgtcttttggcctcggttttccagacgctgcgcgcatattaaggaaaggaacaatgacaacattacttaacccctattttggtgagtttggcggcatgtacgtgccacaaatcctgatgcctgctctgcgccagctggaagaagcttttgtcagcgcgcaaaaagatcctgaatttcaggctcagttcaacgacctgctgaaaaactatgccgggcgtccaaccgcgctgaccaaatgccagaacattacagccgggacgaacaccacgctgtatctgaagcgcgaagatttgctgcacggcggcgcgcataaaactaaccaggtgctcggtcaggctttactggcgaagcggatgggtaaaactgaaattattgccgaaaccggtgccggtcagcatggcgtggcgtcggcccttgccagcgccctgctcggcctgaaatgccgaatttatatgggtgccaaagacgttgaacgccagtcgcccaacgttttccggatgcgcttaatgggtgcggaagtgatcccggtacatagcggttccgcgaccctgaaagatgcctgtaatgaggcgctacgcgactggtccggcagttatgaaaccgcgcactatatgctgggtaccgcagctggcccgcatccttacccgaccattgtgcgtgagtttcagcggatgattggcgaagaaacgaaagcgcagattctggaaagagaaggtcgcctgccggatgccgttatcgcctgtgttggcggtggttcgaatgccatcggtatgtttgcagatttcatcaacgaaaccgacgtcggcctgattggtgtggagcctggcggccacggtatcgaaactggcgagcacggcgcaccgttaaaacatggtcgcgtgggcatctatttcggtatgaaagcgccgatgatgcaaaccgaagacgggcaaattgaagagtcttactccatttctgccgggctggatttcccgtccgtcggcccgcaacatgcgtatctcaacagcactggacgcgctgattacgtgtctattaccgacgatgaagccctggaagcctttaaaacgctttgcctgcatgaagggatcatcccggcgctggaatcctcccacgccctggcccatgcgctgaaaatgatgcgcgaaaatccggaaaaagagcagctactggtggttaacctttccggtcgcggcgataaagacatcttcaccgttcacgatattttgaaagcacgaggggaaatctgatggaacgctacgaatctctgtttgcccagttgaaggagcgcaaagaaggcgcattcgttcctttcgtcaccctcggtgatccgggcattgagcagtcgttgaaaattatcgatacgctaattgaagccggtgctgacgcgctggagttaggcatccccttctccgacccactggcggatggcccgacgattcaaaacgccacactgcgtgcttttgcggcgggagtaaccccggcgcagtgctttgagatgctggcactcattcgccagaagcacccgaccattcccatcggccttttgatgtatgccaacctggtgtttaacaaaggcattgatgagttttatgccgagtgcgagaaagtcggcgtcgattcggtgctggttgccgatgtgcccgtggaagagtccgcgcccttccgccaggccgcgttgcgtcataatgtcgcacctatctttatttgcccgccgaatgccgacgatgatttgctgcgccagatagcctcttacggtcgtggttacacctatttgctgtcgcgagcgggcgtgaccggcgcagaaaaccgcgccgcgttacccctcaatcatctggttgcgaagctgaaagagtacaacgctgcgcctccattgcagggatttggtatttccgccccggatcaggtaaaagccgcgattgatgcaggagctgcgggcgcgatttctggttcggccatcgttaaaatcatcgagcaacatattaatgagccagagaaaatgctggcggcactgaaagcttttgtacaaccgatgaaagcggcgacgcgcagtta

SEQ ID NO: 873 - DNA, 28 bp, Artificial Sequence
  Description of Artificial Sequence: Synthetic oligonucleotide
  BBa_J61132
tctagagaaagacaggattaactagatg

SEQ ID NO: 874 - DNA, 28 bp, Artificial Sequence
  Description of Artificial Sequence: Synthetic oligonucleotide
  BBa_J61136
tctagagaaagagctgagcaactagatg

SEQ ID NO: 875 - DNA, 28 bp, Artificial Sequence
  Description of Artificial Sequence: Synthetic oligonucleotide
  BBa_J61137
tctagagaaagagtagatcaactagatg

SEQ ID NO: 876 - DNA, 28 bp, Artificial Sequence
  Description of Artificial Sequence: Synthetic oligonucleotide
  BBa_J61138
tctagagaaagatatgaataactagatg

SEQ ID NO: 877 - DNA, 28 bp, Artificial Sequence
  Description of Artificial Sequence: Synthetic oligonucleotide
  BBa_J61139
tctagagaaagattagagtcactagatg

SEQ ID NO: 878 - DNA, 6574 bp, Artificial Sequence
  Description of Artificial Sequence: Synthetic polynucleotide
  fbrS40FTrpE-DCBA
ctctagaaataattttgtttaactttaagaaggagatatacatatgcaaacacaaaaaccgactctcgaactgctaacctgcgaaggcgcttatcgcgacaacccgactgcgctttttcaccagttgtgtggggatcgtccggcaacgctgctgctggaattcgcagatatcgacagcaaagatgatttaaaaagcctgctgctggtagacagtgcgctgcgcattacagcattaagtgacactgtcacaatccaggcgctttccggcaatggagaagccctgttgacactactggataacgccttgcctgcgggtgtggaaaatgaacaatcaccaaactgccgcgtactgcgcttcccgcctgtcagtccactgctggatgaagacgcccgcttatgctccctttcggtttttgacgctttccgcttattacagaatctgttgaatgtaccgaaggaagaacgagaagcaatgttcttcggcggcctgttctcttatgaccttgtggcgggatttgaaaatttaccgcaactgtcagcggaaaatagctgccctgatttctgtttttatctcgctgaaacgctgatggtgattgaccatcagaaaaaaagcactcgtattcaggccagcctgtttgctccgaatgaagaagaaaaacaacgtctcactgctcgcctgaacgaactacgtcagcaactgaccgaagccgcgccgccgctgccggtggtttccgtgccgcatatgcgttgtgaatgtaaccagagcgatgaagagttcggtggtgtagtgcgtttgttgcaaaaagcgattcgcgccggagaaattttccaggtggtgccatctcgccgtttctctctgccctgcccgtcaccgctggcagcctattacgtgctgaaaaagagtaatcccagcccgtacatgttttttatgcaggataatgatttcaccctgtttggcgcgtcgccggaaagttcgctcaagtatgacgccaccagccgccagattgagatttacccgattgccggaacacgtccacgcggtcgtcgtgccgatggttcgctggacagagacctcgacagccgcatcgaactggagatgcgtaccgatcataaagagctttctgaacatctgatgctggtggatctcgcccgtaatgacctggcacgcatttgcacacccggcagccgctacgtcgccgatctcaccaaagttgaccgttactcttacgtgatgcacctagtctcccgcgttgttggtgagctgcgccacgatctcgacgccctgcacgcttaccgcgcctgtatgaatatggggacgttaagcggtgcaccgaaagtacgcgctatgcagttaattgccgaagcagaaggtcgtcgacgcggcagctacggcggcgcggtaggttattttaccgcgcatggcgatctcgacacctgcattgtgatccgctcggcgctggtggaaaacggtatcgccaccgtgcaagccggtgctggcgtagtccttgattctgttccgcagtcggaagccgacgaaactcgtaataaagcccgcgctgtactgcgcgctattgccaccgcgcatcatgcacaggagacgttctaatggctgacattctgctgctcgataatatcgactcttttacgtacaacctggcagatcagttgcgcagcaatggtcataacgtggtgatttaccgcaaccatattccggcgcagaccttaattgaacgcctggcgacgatgagcaatccggtgctgatgctttctcctggccccggtgtgccgagcgaagccggttgtatgccggaactcctcacccgcttgcgtggcaagctgccaattattggcatttgcctcggacatcaggcgattgtcgaagcttacgggggctatgtcggtcaggcgggcgaaattcttcacggtaaagcgtcgagcattgaacatgacggtcaggcgatgtttgccggattaacaaacccgctgccagtggcgcgttatcactcgctggttggcagtaacattccggccggtttaaccatcaacgcccattttaatggcatggtgatggcggtgcgtcacgatgcagatcgcgtttgtggattccagttccatccggaatccattcttactacccagggcgctcgcctgctggaacaaacgctggcctgggcgcagcagaaactagagccaaccaacacgctgcaaccgattctggaaaaactgtatcaggcacagacgcttagccaacaagaaagccaccagctgttttcagcggtggtacgtggcgagctgaagccggaacaactggcggcggcgctggtgagcatgaaaattcgcggtgaacacccgaacgagatcgccggggcagcaaccgcgctactggaaaacgccgcgccattcccgcgcccggattatctgtttgccgatatcgtcggtactggcggtgacggcagcaacagcatcaatatttctaccgccagtgcgtttgtcgccgcggcctgcgggctgaaagtggcgaaacacggcaaccgtagcgtctccagtaaatccggctcgtcggatctgctggcggcgttcggtattaatcttgatatgaacgccgataaatcgcgccaggcgctggatgagttaggcgtctgtttcctctttgcgccgaagtatcacaccggattccgccatgcgatgccggttcgccagcaactgaaaacccgcactctgttcaacgtgctgggaccattgattaacccggcgcatccgccgctggcgctaattggtgtttatagtccggaactggtgctgccgattgccgaaaccttgcgcgtgctggggtatcaacgcgcggcagtggtgcacagcggcgggatggatgaagtttcattacacgcgccgacaatcgttgccgaactacatgacggcgaaattaagagctatcaattgaccgctgaagattttggcctgacaccctaccaccaggagcaattggcaggcggaacaccggaagaaaaccgtgacattttaacacgcttgttacaaggtaaaggcgacgccgcccatgaagcagccgtcgcggcgaatgtcgccatgttaatgcgcctgcatggccatgaagatctgcaagccaatgcgcaaaccgttcttgaggtactgcgcagtggttccgcttacgacagagtcaccgcactggcggcacgagggtaaatgatgcaaaccgttttagcgaaaatcgtcgcagacaaggcgatttgggtagaaacccgcaaagagcagcaaccgctggccagttttcagaatgaggttcagccgagcacgcgacatttttatgatgcacttcagggcgcacgcacggcgtttattctggagtgtaaaaaagcgtcgccgtcaaaaggcgtgatccgtgatgatttcgatccggcacgcattgccgccatttataaacattacgcttcggcaatttcagtgctgactgatgagaaatattttcaggggagctttgatttcctccccatcgtcagccaaatcgccccgcagccgattttatgtaaagacttcattatcgatccttaccagatctatctggcgcgctattaccaggccgatgcctgcttattaatgctttcagtactggatgacgaacaatatcgccagcttgcagccgtcgcccacagtctggagatgggtgtgctgaccgaagtcagtaatgaagaggaactggagcgcgccattgcattgggggcaaaggtcgttggcatcaacaaccgcgatctgcgcgatttgtcgattgatctcaaccgtacccgcgagcttgcgccgaaactggggcacaacgtgacggtaatcagcgaatccggcatcaatacttacgctcaggtgcgcgagttaagccacttcgctaacggctttctgattggttcggcgttgatggcccatgacgatttgaacgccgccgtgcgtcgggtgttgctgggtgagaataaagtatgtggcctgacacgtgggcaagatgctaaagcagcttatgacgcgggcgcgatttacggtgggttgatttttgttgcgacatcaccgcgttgcgtcaacgttgaacaggcgcaggaagtgatggctgcagcaccgttgcagtatgttggcgtgttccgcaatcacgatattgccgatgtggcggacaaagctaaggtgttatcgctggcggcagtgcaactgcatggtaatgaagatcagctgtatatcgacaatctgcgtgaggctctgccagcacacgtcgccatctggaaggctttaagtgtcggtgaaactcttcccgcgcgcgattttcagcacatcgataaatatgtattcgacaacggtcagggcgggagcggacaacgtttcgactggtcactattaaatggtcaatcgcttggcaacgttctgctggcggggggcttaggcgcagataactgcgtggaagcggcacaaaccggctgcgccgggcttgattttaattctgctgtagagtcgcaaccgggtatcaaagacgcacgtcttttggcctcggttttccagacgctgcgcgcatattaaggaaaggaacaatgacaacattacttaacccctattttggtgagtttggcggcatgtacgtgccacaaatcctgatgcctgctctgcgccagctggaagaagcttttgtcagcgcgcaaaaagatcctgaatttcaggctcagttcaacgacctgctgaaaaactatgccgggcgtccaaccgcgctgaccaaatgccagaacattacagccgggacgaacaccacgctgtatctgaagcgcgaagatttgctgcacggcggcgcgcataaaactaaccaggtgctcggtcaggctttactggcgaagcggatgggtaaaactgaaattattgccgaaaccggtgccggtcagcatggcgtggcgtcggcccttgccagcgccctgctcggcctgaaatgccgaatttatatgggtgccaaagacgttgaacgccagtcgcccaacgttttccggatgcgcttaatgggtgcggaagtgatcccggtacatagcggttccgcgaccctgaaagatgcctgtaatgaggcgctacgcgactggtccggcagttatgaaaccgcgcactatatgctgggtaccgcagctggcccgcatccttacccgaccattgtgcgtgagtttcagcggatgattggcgaagaaacgaaagcgcagattctggaaagagaaggtcgcctgccggatgccgttatcgcctgtgttggcggtggttcgaatgccatcggtatgtttgcagatttcatcaacgaaaccgacgtcggcctgattggtgtggagcctggcggccacggtatcgaaactggcgagcacggcgcaccgttaaaacatggtcgcgtgggcatctatttcggtatgaaagcgccgatgatgcaaaccgaagacgggcaaattgaagagtcttactccatttctgccgggctggatttcccgtccgtcggcccgcaacatgcgtatctcaacagcactggacgcgctgattacgtgtctattaccgacgatgaagccctggaagcctttaaaacgctttgcctgcatgaagggatcatcccggcgctggaatcctcccacgccctggcccatgcgctgaaaatgatgcgcgaaaatccggaaaaagagcagctactggtggttaacctttccggtcgcggcgataaagacatcttcaccgttcacgatattttgaaagcacgaggggaaatctgatggaacgctacgaatctctgtttgcccagttgaaggagcgcaaagaaggcgcattcgttcctttcgtcaccctcggtgatccgggcattgagcagtcgttgaaaattatcgatacgctaattgaagccggtgctgacgcgctggagttaggcatccccttctccgacccactggcggatggcccgacgattcaaaacgccacactgcgtgcttttgcggcgggagtaaccccggcgcagtgctttgagatgctggcactcattcgccagaagcacccgaccattcccatcggccttttgatgtatgccaacctggtgtttaacaaaggcattgatgagttttatgccgagtgcgagaaagtcggcgtcgattcggtgctggttgccgatgtgcccgtggaagagtccgcgcccttccgccaggccgcgttgcgtcataatgtcgcacctatctttatttgcccgccgaatgccgacgatgatttgctgcgccagatagcctcttacggtcgtggttacacctatttgctgtcgcgagcgggcgtgaccggcgcagaaaaccgcgccgcgttacccctcaatcatctggttgcgaagctgaaagagtacaacgctgcgcctccattgcagggatttggtatttccgccccggatcaggtaaaagccgcgattgatgcaggagctgcgggcgcgatttctggttcggccatcgttaaaatcatcgagcaacatattaatgagccagagaaaatgctggcggcactgaaagcttttgtacaaccgatgaaagcggcgacgcgcagttaa

SEQ ID NO: 879 - DNA, 1562 bp, Artificial Sequence
  Description of Artificial Sequence: Synthetic polynucleotide
  fbrTrpE
atgcaaacacaaaaaccgactctcgaactgctaacctgcgaaggcgcttatcgcgacaacccgactgcgctttttcaccagttgtgtggggatcgtccggcaacgctgctgctggaattcgcagatatcgacagcaaagatgatttaaaaagcctgctgctggtagacagtgcgctgcgcattacagcattaagtgacactgtcacaatccaggcgctttccggcaatggagaagccctgttgacactactggataacgccttgcctgcgggtgtggaaaatgaacaatcaccaaactgccgcgtactgcgcttcccgcctgtcagtccactgctggatgaagacgcccgcttatgctccctttcggtttttgacgctttccgcttattacagaatctgttgaatgtaccgaaggaagaacgagaagcaatgttcttcggcggcctgttctcttatgaccttgtggcgggatttgaaaatttaccgcaactgtcagcggaaaatagctgccctgatttctgtttttatctcgctgaaacgctgatggtgattgaccatcagaaaaaaagcactcgtattcaggccagcctgtttgctccgaatgaagaagaaaaacaacgtctcactgctcgcctgaacgaactacgtcagcaactgaccgaagccgcgccgccgctgccggtggtttccgtgccgcatatgcgttgtgaatgtaaccagagcgatgaagagttcggtggtgtagtgcgtttgttgcaaaaagcgattcgcgccggagaaattttccaggtggtgccatctcgccgtttctctctgccctgcccgtcaccgctggcagcctattacgtgctgaaaaagagtaatcccagcccgtacatgttttttatgcaggataatgatttcaccctgtttggcgcgtcgccggaaagttcgctcaagtatgacgccaccagccgccagattgagatttacccgattgccggaacacgtccacgcggtcgtcgtgccgatggttcgctggacagagacctcgacagccgcatcgaactggagatgcgtaccgatcataaagagctttctgaacatctgatgctggtggatctcgcccgtaatgacctggcacgcatttgcacacccggcagccgctacgtcgccgatctcaccaaagttgaccgttactcttacgtgatgcacctagtctcccgcgttgttggtgagctgcgccacgatctcgacgccctgcacgcttaccgcgcctgtatgaatatggggacgttaagcggtgcaccgaaagtacgcgctatgcagttaattgccgaagcagaaggtcgtcgacgcggcagctacggcggcgcggtaggttattttaccgcgcatggcgatctcgacacctgcattgtgatccgctcggcgctggtggaaaacggtatcgccaccgtgcaagccggtgctggcgtagtccttgattctgttccgcagtcggaagccgacgaaactcgtaataaagcccgcgctgtactgcgcgctattgccaccgcgcatcatgcacaggagacgttcta

SEQ ID NO: 880 - DNA, 31 bp, Artificial Sequence
  Description of Artificial Sequence: Synthetic oligonucleotide
  BBa_B0029
tctagagttcacacaggaaacctactagatg

SEQ ID NO: 881 - DNA, 31 bp, Artificial Sequence
  Description of Artificial Sequence: Synthetic oligonucleotide
  BBa_B0030
tctagagattaaagaggagaaatactagatg

SEQ ID NO: 882 - DNA, 30 bp, Artificial Sequence
  Description of Artificial Sequence: Synthetic oligonucleotide
  BBa_B0031
tctagagtcacacaggaaacctactagatg

SEQ ID NO: 883 - DNA, 29 bp, Artificial Sequence
  Description of Artificial Sequence: Synthetic oligonucleotide
  BBa_B0032
tctagagtcacacaggaaagtactagatg

SEQ ID NO: 884 - DNA, 27 bp, Artificial Sequence
  Description of Artificial Sequence: Synthetic oligonucleotide
  BBa_B0033
tctagagtcacacaggactactagatg

SEQ ID NO: 885 - DNA, 28 bp, Artificial Sequence
  Description of Artificial Sequence: Synthetic oligonucleotide
  BBa_B0034
tctagagaaagaggagaaatactagatg

SEQ ID NO: 886 - DNA, 30 bp, Artificial Sequence
  Description of Artificial Sequence: Synthetic oligonucleotide
  BBa_B0035
tctagagattaaagaggagaatactagatg

SEQ ID NO: 887 - DNA, 28 bp, Artificial Sequence
  Description of Artificial Sequence: Synthetic oligonucleotide
  BBa_B0064
tctagagaaagaggggaaatactagatg

SEQ ID NO: 888 - DNA, 64 bp, Artificial Sequence; identical to SEQ ID NO: 744
  Description of Artificial Sequence: Synthetic oligonucleotide
  SYN23119 promoter

SEQ ID NO: 889 - DNA, 94 bp, Artificial Sequence
  Description of Artificial Sequence: Synthetic oligonucleotide
  SYN23119 promoter with RBS
ggaaaatttttttaaaaaaaaaacttgacagctagctcagtccttggtataatgctagcacgaagtgaattatataaaagtgggaggtgcccga

SEQ ID NO: 890 - DNA, 1225 bp, Artificial Sequence
  Description of Artificial Sequence: Synthetic polynucleotide
  Pseudomonas fluorescens, codon optimized for expression in E. coli, driven by the SYN23119 Construct can be expressed from a plasmid, e.g., p15 or can be integrated into the chromosome, e.g., at the HA3/4 site
ggaaaatttttttaaaaaaaaaacttgacagctagctcagtccttggtataatgctagcacgaagtgaattatataaaagtgggaggtgcccgaatgacgacccgaaatgattgcctagcgttggatgcacaggacagtctggctccgctgcgccaacaatttgcgctgccggagggtgtgatatacctggatggcaattcgctgggcgcacgtccggtagctgcgctggctcgcgcgcaggctgtgatcgcagaagaatggggcaacgggttgatccgttcatggaactctgcgggctggcgtgatctgtctgaacgcctgggtaatcgcctggctaccctgattggtgcgcgcgatggggaagtagttgttactgataccacctcgattaatctgtttaaagtgctgtcagcggcgctgcgcgtgcaagctacccgtagcccggagcgccgtgttatcgtgactgagacctcgaatttcccgaccgacctgtatattgcggaagggttggcggatatgctgcaacaaggttacactctgcgtttggtggattcaccggaagagctgccacaggctatagatcaggacaccgcggtggtgatgctgacgcacgtaaattataaaaccggttatatgcacgacatgcaggctctgaccgcgttgagccacgagtgtggggctctggcgatttgggatctggcgcactctgctggcgctgtgccggtggacctgcaccaagcgggcgcggactatgcgattggctgcacgtacaaatacctgaatggcggcccgggttcgcaagcgtttgtttgggtttcgccgcaactgtgcgacctggtaccgcagccgctgtctggttggttcggccatagtcgccaattcgcgatggagccgcgctacgaaccttctaacggcattgctcgctatctgtgcggcactcagcctattactagcttggctatggtggagtgcggcctggatgtgtttgcgcagacggatatggcttcgctgcgccgtaaaagtctggcgctgactgatctgttcatcgagctggttgaacaacgctgcgctgcacacgaactgaccctggttactccacgtgaacacgcgaaacgcggctctcacgtgtcttttgaacaccccgagggttacgctgttattcaagctctgattgatcgtggcgtgatcggcgattaccgtgagccacgtattatgcgtttcggt

SEQ ID NO: 891 - DNA, 66 bp, Artificial Sequence; identical to SEQ ID NO: 740
  Description of Artificial Sequence: Synthetic oligonucleotide
  Lpp promoter from E. coli SEQ ID NO: 891

SEQ ID NO: 892 - DNA, 96 bp, Artificial Sequence
  Description of Artificial Sequence: Synthetic oligonucleotide
  Lpp promoter from E. coli SEQ ID NO: 892
ataagtgccttcccatcaaaaaaatattctcaacataaaaaactttgtgtaatacttgtaacgctagtgaattatataaaagtgggaggtgcccga

SEQ ID NO: 893 - DNA, 1347 bp, Artificial Sequence
  Description of Artificial Sequence: Synthetic polynucleotide
  Pseudomonas fluorescens kynureninase driven by Lpp promoter from E. coli SEQ ID NO: 893 Construct can be expressed from a plasmid, e.g., p15 or can be integrated into the chromosome, e.g., at the HA3/4 site
ataagtgccttcccatcaaaaaaatattctcaacataaaaaactttgtgtaatacttgtaacgctagtgaattatataaaagtgggaggtgcccgaatgacgacccgaaatgattgcctagcgttggatgcacaggacagtctggctccgctgcgccaacaatttgcgctgccggagggtgtgatatacctggatggcaattcgctgggcgcacgtccggtagctgcgctggctcgcgcgcaggctgtgatcgcagaagaatggggcaacgggttgatccgttcatggaactctgcgggctggcgtgatctgtctgaacgcctgggtaatcgcctggctaccctgattggtgcgcgcgatggggaagtagttgttactgataccacctcgattaatctgtttaaagtgctgtcagcggcgctgcgcgtgcaagctacccgtagcccggagcgccgtgttatcgtgactgagacctcgaatttcccgaccgacctgtatattgcggaagggttggcggatatgctgcaacaaggttacactctgcgtttggtggattcaccggaagagctgccacaggctatagatcaggacaccgcggtggtgatgctgacgcacgtaaattataaaaccggttatatgcacgacatgcaggctctgaccgcgttgagccacgagtgtggggctctggcgatttgggatctggcgcactctgctggcgctgtgccggtggacctgcaccaagcgggcgcggactatgcgattggctgcacgtacaaatacctgaatggcggcccgggttcgcaagcgtttgtttgggtttcgccgcaactgtgcgacctggtaccgcagccgctgtctggttggttcggccatagtcgccaattcgcgatggagccgcgctacgaaccttctaacggcattgctcgctatctgtgcggcactcagcctattactagcttggctatggtggagtgcggcctggatgtgtttgcgcagacggatatggcttcgctgcgccgtaaaagtctggcgctgactgatctgttcatcgagctggttgaacaacgctgcgctgcacacgaactgaccctggttactccacgtgaacacgcgaaacgcggctctcacgtgtcttttgaacaccccgagggttacgctgttattcaagctctgattgatcgtggcgtgatcggcgattaccgtgagccacgtattatgcgtttcggtttcactcctctgtatactacttttacggaagtttgggatgcagtacaaatcctgggcgaaatcctggatcgtaagacttgggcgcaggctcagtttcaggtgcgccactctgttacttaa

SEQ ID NO: 894 - DNA, 138 bp, Artificial Sequence
  Description of Artificial Sequence: Synthetic polynucleotide
  fliC-FliC20
tgacggcgattgagccgacgggtggaaacccaaaacgtaatcaacgtgggtactccttaaattgggttcgaatggaccatggcacaagtcattaataccaacagcctctcgctgatcactcaaaataatatcaacaag

SEQ ID NO: 895 - DNA, 70 bp, Artificial Sequence
  Description of Artificial Sequence: Synthetic oligonucleotide
  fliC-RBS
tgacggcgattgagccgacgggtggaaacccaaaacgtaatcaactacgaacacttacaggaggtaccca

SEQ ID NO: 896 - DNA, 70 bp, Artificial Sequence
  Description of Artificial Sequence: Synthetic oligonucleotide
  fliC-RBS
tgacggcgattgagccgacgggtggaaacccaaaacgtaatcaacaagtataaactctgggaggttccta

SEQ ID NO: 897 - DNA, 70 bp, Artificial Sequence
  Description of Artificial Sequence: Synthetic oligonucleotide
  fliC-RBS
tgacggcgattgagccgacgggtggaaacccaaaacgtaatcaactcaaatcccttaataaggaggtaaa

SEQ ID NO: 898 - DNA, 106 bp, Artificial Sequence
  Description of Artificial Sequence: Synthetic polynucleotide
  RBS-phoA
ctctagaaataattttgtttaactttaagaaggagatatacatatgaaacaaagcactattgcactggcactcttaccgttactgtttacccctgtgacaaaagcg

SEQ ID NO: 899 - DNA, 63 bp, Artificial Sequence
  Description of Artificial Sequence: Synthetic oligonucleotide
  phoA
atgaaacaaagcactattgcactggcactcttaccgttactgtttacccctgtgacaaaagcg

SEQ ID NO: 900 - DNA, 109 bp, Artificial Sequence
  Description of Artificial Sequence: Synthetic polynucleotide
  RBS-ompF
ctctagaaataattttgtttaactttaagaaggagatatacatatgatgaagcgcaatattctggcagtgatcgtccctgctctgttagtagcaggtactgcaaacgct

SEQ ID NO: 901 - DNA, 66 bp, Artificial Sequence
  Description of Artificial Sequence: Synthetic oligonucleotide
  ompF
atgatgaagcgcaatattctggcagtgatcgtccctgctctgttagtagcaggtactgcaaacgct

SEQ ID NO: 902 - DNA, 88 bp, Artificial Sequence
  Description of Artificial Sequence: Synthetic oligonucleotide
  RBS-cvaC
ctctagaaataattttgtttaactttaagaaggagatatacatatgagaactctgactctaaatgaattagattctgtttctggtggt

SEQ ID NO: 903 - DNA, 45 bp, Artificial Sequence
  Description of Artificial Sequence: Synthetic oligonucleotide
  cvaC
atgagaactctgactctaaatgaattagattctgtttctggtggt

SEQ ID NO: 904 - DNA, 88 bp, Artificial Sequence
  Description of Artificial Sequence: Synthetic oligonucleotide
  RBS-phoA (Optimized)
gacgccagagagttaagggggttaaatgaaacaatcgaccatcgcattggcgctgcttcctctattgttcacaccggtgacaaaggca

SEQ ID NO: 905 - DNA, 63 bp, Artificial Sequence
  Description of Artificial Sequence: Synthetic oligonucleotide
  Optimized phoA
atgaaacaatcgaccatcgcattggcgctgcttcctctattgttcacaccggtgacaaaggca

SEQ ID NO: 906 - DNA, 160 bp, Artificial Sequence
  Description of Artificial Sequence: Synthetic polynucleotide
  RBS-TorA
ctctagaaataattttgtttaactttaagaaggagatatacatatgaacaataacgatctctttcaggcatcacgtcggcgttttctggcacaactcggcggcttaaccgtcgccgggatgctggggccgtcattgttaacgccgcgacgtgcgactgcg

SEQ ID NO: 907 - DNA, 117 bp, Artificial Sequence
  Description of Artificial Sequence: Synthetic polynucleotide
  TorA
atgaacaataacgatctctttcaggcatcacgtcggcgttttctggcacaactcggcggcttaaccgtcgccgggatgctggggccgtcattgttaacgccgcgacgtgcgactgcg

SEQ ID NO: 908 - DNA, 148 bp, Artificial Sequence
  Description of Artificial Sequence: Synthetic polynucleotide
  RBS-TorA alternate
cccacattcgaggtactaaatgaacaataacgatctctttcaggcatcacgtcggcgttttctggcacaactcggcggcttaaccgtcgccgggatgctggggacgtcattgttaacgccgcgccgtgcgactgcggcgcaagcggcg

SEQ ID NO: 909 - DNA, 129 bp, Artificial Sequence
  Description of Artificial Sequence: Synthetic polynucleotide
  TorA (alternate)
atgaacaataacgatctctttcaggcatcacgtcggcgttttctggcacaactcggcggcttaaccgtcgccgggatgctggggacgtcattgttaacgccgcgccgtgcgactgcggcgcaagcggcg

SEQ ID NO: 910 - DNA, 130 bp, Artificial Sequence
  Description of Artificial Sequence: Synthetic polynucleotide
  RBS-fdnG
accctattacacacctaaggaggccaaatacatggacgtcagtcgcagacaattttttaaaatctgcgcgggcggtatggcgggaacaacagtagcagcattgggctttgccccgaagcaagcactggct

SEQ ID NO: 911 - DNA, 99 bp, Artificial Sequence
  Description of Artificial Sequence: Synthetic oligonucleotide
  fdnG
atggacgtcagtcgcagacaattttttaaaatctgcgcgggcggtatggcgggaacaacagtagcagcattgggctttgccccgaagcaagcactggct

SEQ ID NO: 912 - DNA, 168 bp, Artificial Sequence
  Description of Artificial Sequence: Synthetic polynucleotide
  RBS-dmsA
tacgcaaaaaacataatttaagagaggataaacatgaaaacgaaaatccctgatgcggtattggctgctgaggtgagtcgccgtggtttggtaaaaacgacagcgatcggcggcctggcaatggccagcagcgcattaacattaccttttagtcggattgcgcacgct

SEQ ID NO: 913 - DNA, 135 bp, Artificial Sequence
  Description of Artificial Sequence: Synthetic polynucleotide
  dmsA
atgaaaacgaaaatccctgatgcggtattggctgctgaggtgagtcgccgtggtttggtaaaaacgacagcgatcggcggcctggcaatggccagcagcgcattaacattaccttttagtcggattgcgcacgct

SEQ ID NO: 914 - DNA, 712 bp, Artificial Sequence
  Description of Artificial Sequence: Synthetic polynucleotide
  TetR/TetA Promoter
gaattcgttaagacccactttcacatttaagttgtttttctaatccgcatatgatcaattcaaggccgaataagaaggctggctctgcaccttggtgatcaaataattcgatagcttgtcgtaataatggcggcatactatcagtagtaggtgtttccctttcttctttagcgacttgatgctcttgatcttccaatacgcaacctaaagtaaaatgccccacagcgctgagtgcatataatgcattctctagtgaaaaaccttgttggcataaaaaggctaattgattttcgagagtttcatactgtttttctgtaggccgtgtacctaaatgtacttttgctccatcgcgatgacttagtaaagcacatctaaaacttttagcgttattacgtaaaaaatcttgccagctttccccttctaaagggcaaaagtgagtatggtgcctatctaacatctcaatggctaaggcgtcgagcaaagcccgcttattttttacatgccaatacaatgtaggctgctctacacctagcttctgggcgagtttacgggttgttaaaccttcgattccgacctcattaagcagctctaatgcgctgttaatcactttacttttatctaatctagacatcattaattcctaatttttgttgacactctatcattgatagagttattttaccactccctatcagtgatagagaaaagtgaa

SEQ ID NO: 915 - DNA, 104 bp, Artificial Sequence; identical to SEQ ID NO: 801
  Description of Artificial Sequence: Synthetic polynucleotide
  fliC Promoter

SEQ ID NO: 916 - DNA, 162 bp, Artificial Sequence
  Description of Artificial Sequence: Synthetic polynucleotide
  FnrS Promoter
ggtaccagttgttcttattggtggtgttgctttatggttgcatcgtagtaaatggttgtaacaaaagcaatttttccggctgtctgtatacaaaaacgccgcaaagtttgagcgaagtcaataaactctctacccattcagggcaatatctctcttggatcc

SEQ ID NO: 917 - DNA, 358 bp, Artificial Sequence
  Description of Artificial Sequence: Synthetic polynucleotide
  DOM Construct Terminator
cacatttccccgaaaagtgccgatggccccccgatggtagtgtggcccatgcgagagtagggaactgccaggcatcaaataaaacgaaaggctcagtcgaaagactgggcctttcgttttatctgttgtttgtcggtgaacgctctcctgagtaggacaaatccgccgggagcggatttgaacgttgcgaagcaacggcccggagggtggcgggcaggacgcccgccataaactgccaggcatcaaattaagcagaaggccatcctgacggatggcctttttgcgtggccagtgccaagcttgcatgcagattgcagcattacacgtcttgagcgattgtgtaggctggagctgcttc

SEQ ID NO: 918 - DNA, 48 bp, Artificial Sequence
  Description of Artificial Sequence: Synthetic oligonucleotide
  FRT Site
gaagttcctatactttctagagaataggaacttcggaataggaacttc

SEQ ID NO: 919 - DNA, 1345 bp, Artificial Sequence
  Description of Artificial Sequence: Synthetic polynucleotide
  Kanamycin Resistance Cassette (for integration in between FRT sites)
aagatcccctcacgctgccgcaagcactcagggcgcaagggctgctaaaggaagcggaacacgtagaaagccagtccgcagaaacggtgctgaccccggatgaatgtcagctactgggctatctggacaagggaaaacgcaagcgcaaagagaaagcaggtagcttgcagtgggcttacatggcgatagctagactgggcggttttatggacagcaagcgaaccggaattgccagctggggcgccctctggtaaggttgggaagccctgcaaagtaaactggatggctttcttgccgccaaggatctgatggcgcaggggatcaagatctgatcaagagacaggatgaggatcgtttcgcatgattgaacaagatggattgcacgcaggttctccggccgcttgggtggagaggctattcggctatgactgggcacaacagacaatcggctgctctgatgccgccgtgttccggctgtcagcgcaggggcgcccggttctttttgtcaagaccgacctgtccggtgccctgaatgaactgcaggacgaggcagcgcggctatcgtggctggccacgacgggcgttccttgcgcagctgtgctcgacgttgtcactgaagcgggaagggactggctgctattgggcgaagtgccggggcaggatctcctgtcatctcaccttgctcctgccgagaaagtatccatcatggctgatgcaatgcggcggctgcatacgcttgatccggctacctgcccattcgaccaccaagcgaaacatcgcatcgagcgagcacgtactcggatggaagccggtcttgtcgatcaggatgatctggacgaagagcatcaggggctcgcgccagccgaactgttcgccaggctcaaggcgcgcatgcccgacggcgaggatctcgtcgtgacccatggcgatgcctgcttgccgaatatcatggtggaaaatggccgcttttctggattcatcgactgtggccggctgggtgtggcggaccgctatcaggacatagcgttggctacccgtgatattgctgaagagcttggcggcgaatgggctgaccgcttcctcgtgctttacggtatcgccgctcccgattcgcagcgcatcgccttctatcgccttcttgacgagttcttctgagcgggactctggggttcgaaatgaccgaccaagcgacgcccaacctgccatcacgagatttcgattccaccgccgccttctatgaaaggttgggcttcggaatcgttttccgggacgccggctggatgatcctccagcgcggggatctcatgctggagttcttcgcccaccccagcttcaaaagcgctct

SEQ ID NO: 920 - protein, 219 aa, Artificial Sequence
  Description of Artificial Sequence: Synthetic polypeptide
  human IL-12a construct with a N terminal OmpF secretion tag (sec-dependent secretion system)
MMKRNILAVIVPALLVAGTANARNLPVATPDPGMFPCLHHSQNLLRAVSNMLQKARQTLEFYPCTSEEIDHEDITKDKTSTVEACLPLELTKNESCLNSRETSFITNGSCLASRKTSFMMALCLSSIYEDLKMYQVEFKTMNAKLLMDPKRQIFLDQNMLAVIDELMQALNFNSETVPQKSSLEEPDFYKTKIKLCILLHAFRIRAVTIDRVMSYLNAS

SEQ ID NO: 921 - protein, 218 aa, Artificial Sequence
  Description of Artificial Sequence: Synthetic polypeptide
  human IL-12a construct with a N terminal PhoA secretion
MKQSTIALALLPLLFTPVTKARNLPVATPDPGMFPCLHHSQNLLRAVSNMLQKARQTLEFYPCTSEEIDHEDITKDKTSTVEACLPLELTKNESCLNSRETSFITNGSCLASRKTSFMMALCLSSIYEDLKMYQVEFKTMNAKLLMDPKRQIFLDQNMLAVIDELMQALNFNSETVPQKSSLEEPDFYKTKIKLCILLHAFRIRAVTIDRVMSYLNAS

SEQ ID NO: 922 - protein, 236 aa, Artificial Sequence
  Description of Artificial Sequence: Synthetic polypeptide
  human IL-12a construct with a N terminal TorA secretion tag (sec-dependent secretion system)
MNNNDLFQASRRRFLAQLGGLTVAGMLGPSLLTPRRATARNLPVATPDPGMFPCLHHSQNLLRAVSNMLQKARQTLEFYPCTSEEIDHEDITKDKTSTVEACLPLELTKNESCLNSRETSFITNGSCLASRKTSFMMALCLSSIYEDLKMYQVEFKTMNAKLLMDPKRQIFLDQNMLAVIDELMQALNFNSETVPQKSSLEEPDFYKTKIKLCILLHAFRIRAVTIDRVMSYLNAS

SEQ ID NO: 923 - protein, 328 aa, Artificial Sequence
  Description of Artificial Sequence: Synthetic polypeptide
  human IL-12b construct with a N terminal OmpF secretion tag (sec-dependent secretion system)
MMKRNILAVIVPALLVAGTANAIWELKKDVYVVELDWYPDAPGEMVVLTCDTPEEDGITWTLDQSSEVLGSGKTLTIQVKEFGDAGQYTCHKGGEVLSHSLLLLHKKEDGIWSTDILKDQKEPKNKTFLRCEAKNYSGRFTCWWLTTISTDLTFSVKSSRGSSDPQGVTCGAATLSAERVRGDNKEYEYSVECQEDSACPAAEESLPIEVMVDAVHKLKYENYTSSFFIRDIIKPDPPKNLQLKPLKNSRQVEVSWEYPDTWSTPHSYFSLTFCVQVQGKSKREKKDRVFTDKTSATVICRKNASISVRAQDRYYSSSWSEWASVPCS

SEQ ID NO: 924 - protein, 327 aa, Artificial Sequence
  Description of Artificial Sequence: Synthetic polypeptide
  human IL-12b construct with a N terminal PhoA secretion tag
MKQSTIALALLPLLFTPVTKAIWELKKDVYVVELDWYPDAPGEMVVLTCDTPEEDGITWTLDQSSEVLGSGKTLTIQVKEFGDAGQYTCHKGGEVLSHSLLLLHKKEDGIWSTDILKDQKEPKNKTFLRCEAKNYSGRFTCWWLTTISTDLTFSVKSSRGSSDPQGVTCGAATLSAERVRGDNKEYEYSVECQEDSACPAAEESLPIEVMVDAVHKLKYENYTSSFFIRDIIKPDPPKNLQLKPLKNSRQVEVSWEYPDTWSTPHSYFSLTFCVQVQGKSKREKKDRVFTDKTSATVICRKNASISVRAQDRYYSSSWSEWASVPCS

SEQ ID NO: 925 - protein, 345 aa, Artificial Sequence
  Description of Artificial Sequence: Synthetic polypeptide
  human IL-12 construct with a N terminal TorA secretion tag (sec-dependent secretion system)
MNNNDLFQASRRRFLAQLGGLTVAGMLGPSLLTPRRATAIWELKKDVYVVELDWYPDAPGEMVVLTCDTPEEDGITWTLDQSSEVLGSGKTLTIQVKEFGDAGQYTCHKGGEVLSHSLLLLHKKEDGIWSTDILKDQKEPKNKTFLRCEAKNYSGRFTCWWLTTISTDLTFSVKSSRGSSDPQGVTCGAATLSAERVRGDNKEYEYSVECQEDSACPAAEESLPIEVMVDAVHKLKYENYTSSFFIRDIIKPDPPKNLQLKPLKNSRQVEVSWEYPDTWSTPHSYFSLTFCVQVQGKSKREKKDRVFTDKTSATVICRKNASISVRAQDRYYSSSWSEWASVPCS

SEQ ID NO: 926 - protein, 219 aa, Artificial Sequence; identical to SEQ ID NO: 920
  Description of Artificial Sequence: Synthetic polypeptide
  murine IL-12a construct with a N terminal OmpF secretion tag (sec-dependent secretion system)

SEQ ID NO: 927 - protein, 218 aa, Artificial Sequence; identical to SEQ ID NO: 921
  Description of Artificial Sequence: Synthetic polypeptide
  murine IL-12a construct with a N terminal PhoA secretion tag

SEQ ID NO: 928 - protein, 236 aa, Artificial Sequence; identical to SEQ ID NO: 922
  Description of Artificial Sequence: Synthetic polypeptide
  murine IL-12a construct with a N terminal TorA secretion tag (sec-dependent secretion system)

SEQ ID NO: 929 - protein, 335 aa, Artificial Sequence
  Description of Artificial Sequence: Synthetic polypeptide
  murine IL-12b construct with a N terminal OmpF secretion tag (sec-dependent secretion system)
MMKRNILAVIVPALLVAGTANAMWELEKDVYVVEVDWTPDAPGETVNLTCDTPEEDDITWTSDQRHGVIGSGKTLTITVKEFLDAGQYTCHKGGETLSHSHLLLHKKENGIWSTEILKNFKNKTFLKCEAPNYSGRFTCSWLVQRNMDLKFNIKSSSSSPDSRAVTCGMASLSAEKVTLDQRDYEKYSVSCQEDVTCPTAEETLPIELALEARQQNKYENYSTSFFIRDIIKPDPPKNLQMKPLKNSQVEVSWEYPDSWSTPHSYFSLKFFVRIQRKKEKMKETEEGCNQKGAFLVEKTSTEVQCKGGNVCVQAQDRYYNSSCSKWACVPCRVRS

SEQ ID NO: 930 - protein, 334 aa, Artificial Sequence
  Description of Artificial Sequence: Synthetic polypeptide
  murine IL-12b construct with a N terminal PhoA secretion tag
MKQSTIALALLPLLFTPVTKAMWELEKDVYVVEVDWTPDAPGETVNLTCDTPEEDDITWTSDQRHGVIGSGKTLTITVKEFLDAGQYTCHKGGETLSHSHLLLHKKENGIWSTEILKNFKNKTFLKCEAPNYSGRFTCSWLVQRNMDLKFNIKSSSSSPDSRAVTCGMASLSAEKVTLDQRDYEKYSVSCQEDVTCPTAEETLPIELALEARQQNKYENYSTSFFIRDIIKPDPPKNLQMKPLKNSQVEVSWEYPDSWSTPHSYFSLKFFVRIQRKKEKMKETEEGCNQKGAFLVEKTSTEVQCKGGNVCVQAQDRYYNSSCSKWACVPCRVRS

SEQ ID NO: 931 - protein, 352 aa, Artificial Sequence
  Description of Artificial Sequence: Synthetic polypeptide
  murine IL-12b construct with a N terminal TorA secretion tag (sec-dependent secretion system)
MNNNDLFQASRRRFLAQLGGLTVAGMLGPSLLTPRRATAMWELEKDVYVVEVDWTPDAPGETVNLTCDTPEEDDITWTSDQRHGVIGSGKTLTITVKEFLDAGQYTCHKGGETLSHSHLLLHKKENGIWSTEILKNFKNKTFLKCEAPNYSGRFTCSWLVQRNMDLKFNIKSSSSSPDSRAVTCGMASLSAEKVTLDQRDYEKYSVSCQEDVTCPTAEETLPIELALEARQQNKYENYSTSFFIRDIIKPDPPKNLQMKPLKNSQVEVSWEYPDSWSTPHSYFSLKFFVRIQRKKEKMKETEEGCNQKGAFLVEKTSTEVQCKGGNVCVQAQDRYYNSSCSKWACVPCRVRS

SEQ ID NO: 932 - protein, 149 aa, Artificial Sequence
  Description of Artificial Sequence: Synthetic polypeptide
  human GMCSF construct with a N terminal OmpF secretion tag (sec-dependent secretion system)
MMKRNILAVIVPALLVAGTANAAPARSPSPSTQPWEHVNAIQEARRLLNLSRDTAAEMNETVEVISEMFDLQEPTCLQTRLELYKQGLRGSLTKLKGPLTMMASHYKQHCPPTPETSCATQIITFESFKENLKDFLLVIPFDCWEPVQE

SEQ ID NO: 933 - protein, 148 aa, Artificial Sequence
  Description of Artificial Sequence: Synthetic polypeptide
  human GMCSF construct with a N terminal PhoA secretion tag
MKQSTIALALLPLLFTPVTKAAPARSPSPSTQPWEHVNAIQEARRLLNLSRDTAAEMNETVEVISEMFDLQEPTCLQTRLELYKQGLRGSLTKLKGPLTMMASHYKQHCPPTPETSCATQIITFESFKENLKDFLLVIPFDCWEPVQE

SEQ ID NO: 934 - protein, 166 aa, Artificial Sequence
  Description of Artificial Sequence: Synthetic polypeptide
  human GMCSF construct with a N terminal TorA secretion tag (sec-dependent secretion system)
MNNNDLFQASRRRFLAQLGGLTVAGMLGPSLLTPRRATAAPARSPSPSTQPWEHVNAIQEARRLLNLSRDTAAEMNETVEVISEMFDLQEPTCLQTRLELYKQGLRGSLTKLKGPLTMMASHYKQHCPPTPETSCATQIITFESFKENLKDFLLVIPFDCWEPVQE

SEQ ID NO: 935 - protein, 136 aa, Artificial Sequence
  Description of Artificial Sequence: Synthetic polypeptide
  human Il-15 construct with a N terminal OmpF secretion tag (sec-dependent secretion system)
MMKRNILAVIVPALLVAGTANANWVNVISDLKKIEDLIQSMHIDATLYTESDVHPSCKVTAMKCFLLELQVISLESGDASIHDTVENLIILANNSLSSNGNVTESGCKECEELEEKNIKEFLQSFVHIVQMFINTS

SEQ ID NO: 936 - protein, 135 aa, Artificial Sequence
  Description of Artificial Sequence: Synthetic polypeptide
  human Il-15 construct with a N terminal PhoA secretion tag
MKQSTIALALLPLLFTPVTKANWVNVISDLKKIEDLIQSMHIDATLYTESDVHPSCKVTAMKCFLLELQVISLESGDASIHDTVENLIILANNSLSSNGNVTESGCKECEELEEKNIKEFLQSFVHIVQMFINTS

SEQ ID NO: 937 - protein, 153 aa, Artificial Sequence
  Description of Artificial Sequence: Synthetic polypeptide
  human Il-15 construct with a N terminal TorA secretion tag (sec-dependent secretion system)
MNNNDLFQASRRRFLAQLGGLTVAGMLGPSLLTPRRATANWVNVISDLKKIEDLIQSMHIDATLYTESDVHPSCKVTAMKCFLLELQVISLESGDASIHDTVENLIILANNSLSSNGNVTESGCKECEELEEKNIKEFLQSFVHIVQMFINTS

SEQ ID NO: 938 - protein, 199 aa, Artificial Sequence
  Description of Artificial Sequence: Synthetic polypeptide
  human TNFa construct with a N terminal OmpF secretion tag (sec-dependent secretion system)
MMKRNILAVIVPALLVAGTANAGPQREEFPRDLSLISPLAQAVRSSSRTPSDKPVAHVVANPQAEGQLQWLNRRANALLANGVELRDNQLVVPSEGLYLIYSQVLFKGQGCPSTHVLLTHTISRIAVSYQTKVNLLSAIKSPCQRETPEGAEAKPWYEPIYLGGVFQLEKGDRLSAEINRPDYLDFAESGQVYFGIIAL

SEQ ID NO: 939 - protein, 198 aa, Artificial Sequence
  Description of Artificial Sequence: Synthetic polypeptide
  human TNFa construct with a N terminal PhoA secretion tag
MKQSTIALALLPLLFTPVTKAGPQREEFPRDLSLISPLAQAVRSSSRTPSDKPVAHVVANPQAEGQLQWLNRRANALLANGVELRDNQLVVPSEGLYLIYSQVLFKGQGCPSTHVLLTHTISRIAVSYQTKVNLLSAIKSPCQRETPEGAEAKPWYEPIYLGGVFQLEKGDRLSAEINRPDYLDFAESGQVYFGIIAL

SEQ ID NO: 940 - protein, 216 aa, Artificial Sequence
  Description of Artificial Sequence: Synthetic polypeptide
  human TNFa construct with a N terminal TorA secretion tag (sec-dependent secretion system)
MNNNDLFQASRRRFLAQLGGLTVAGMLGPSLLTPRRATAGPQREEFPRDLSLISPLAQAVRSSSRTPSDKPVAHVVANPQAEGQLQWLNRRANALLANGVELRDNQLVVPSEGLYLIYSQVLFKGQGCPSTHVLLTHTISRIAVSYQTKVNLLSAIKSPCQRETPEGAEAKPWYEPIYLGGVFQLEKGDRLSAEINRPDYLDFAESGQVYFGIIAL

SEQ ID NO: 941 - protein, 160 aa, Artificial Sequence
  Description of Artificial Sequence: Synthetic polypeptide
  human IFNg construct with a N terminal OmpF secretion tag (sec-dependent secretion system)
MMKRNILAVIVPALLVAGTANAQDPYVKEAENLKKYFNAGHSDVADNGTLFLGILKNWKEESDRKIMQSQIVSFYFKLFKNFKDDQSIQKSVETIKEDMNVKFFNSNKKKRDDFEKLTNYSVTDLNVQRKAIHELIQVMAELSPAAKTGKRKRSQMLFRG

SEQ ID NO: 942 - protein, 159 aa, Artificial Sequence
  Description of Artificial Sequence: Synthetic polypeptide
  human IFNg construct with a N terminal PhoA secretion tag
MKQSTIALALLPLLFTPVTKAQDPYVKEAENLKKYFNAGHSDVADNGTLFLGILKNWKEESDRKIMQSQIVSFYFKLFKNFKDDQSIQKSVETIKEDMNVKFFNSNKKKRDDFEKLTNYSVTDLNVQRKAIHELIQVMAELSPAAKTGKRKRSQMLFRG

SEQ ID NO: 943 - protein, 177 aa, Artificial Sequence
  Description of Artificial Sequence: Synthetic polypeptide
  human IFNg construct with a N terminal TorA secretion tag (sec-dependent secretion system)
MNNNDLFQASRRRFLAQLGGLTVAGMLGPSLLTPRRATAQDPYVKEAENLKKYFNAGHSDVADNGTLFLGILKNWKEESDRKIMQSQIVSFYFKLFKNFKDDQSIQKSVETIKEDMNVKFFNSNKKKRDDFEKLTNYSVTDLNVQRKAIHELIQVMAELSPAAKTGKRKRSQMLFRG

SEQ ID NO: 944-952 - skipped (9 entries)

SEQ ID NO: 953 - DNA, 657 bp, Artificial Sequence
  Description of Artificial Sequence: Synthetic polynucleotide
  human IL-12a construct with a N terminal PhoA secretion tag
atgaaacagagcacaattgctctggccttgttgccattactgtttacccctgttactaaggctaggaacctgcctgtggcaacaccagaccctgggatgttcccttgcttacatcattcccagaacctgttgcgtgcggtgtctaacatgctgcagaaagccaggcagacgctggaattctacccatgcacttccgaagagatagatcatgaagacattacgaaagacaaaacctcaacggttgaagcatgcttacctctggaattgactaagaatgaatcgtgcttaaactcaagagagaccagtttcatcactaatggctcttgcttagcgtcgcgcaagaccagcttcatgatggcgctctgcctaagtagcatctacgaggacctcaaaatgtaccaagttgaatttaaaactatgaatgccaaacttctaatggacccaaaaagacagatatttttagatcagaatatgcttgcggttattgacgaactcatgcaggcattgaattttaattccgagacggtgccacaaaaaagttctttggaggagccggacttttacaagacaaaaatcaagctgtgcatacttcttcacgcattcagaatacgggccgttacgatcgatcgcgtcatgtcgtatcttaatgcgagctga

SEQ ID NO: 954 - DNA, 987 bp, Artificial Sequence
  Description of Artificial Sequence: Synthetic polynucleotide
  human IL-12b construct with a N terminal PhoA secretion tag
atgaagcagagcacgatcgcattggcgttgctaccgctgttgtttaccccggtcacaaaagccatctgggaactgaaaaaagatgtttatgtagttgaactggattggtacccggatgcacccggtgagatggtggttttgacctgcgacacgccggaagaagatggcataacgtggaccctggatcaaagctctgaagttctgggttcaggtaagacattgacgatccaagtaaaagaatttggcgacgcaggtcagtacacctgccacaaaggtggcgaagttctgtcgcactcactcctgctcctgcacaaaaaagaggatggcatctggagtactgatatcctaaaggatcaaaaagaacctaaaaacaaaacgttcttgcgctgtgaagcgaagaactatagtggtcgctttacgtgctggtggttgactaccatttccaccgatttgaccttttctgttaagagttcgcgcggctcgtcagatccgcagggcgttacttgcggtgcggcgacgctgtcagctgagagagttcgtggggacaacaaagagtacgaatatagtgtagaatgtcaagaggattcggcgtgcccggcagcagaggagtctctccccattgaagttatggtggacgcagtgcataaactgaaatatgagaattacacatcaagcttttttattcgcgatatcatcaaaccggatcctccaaaaaatctgcaactaaagcccctgaaaaattcgcgccaagttgaggtgagctgggaatatccggatacttggtcgacaccgcattcttatttctcactgaccttctgcgttcaggttcaaggtaaatcaaaacgagaaaaaaaggatcgcgtctttaccgacaaaacgtctgctactgtaatctgccgcaagaatgcgtcaatttctgtacgtgcgcaagatcgctactactctagtagttggtctgaatgggcttcagtgccatgctcctgatga

SEQ ID NO: 955 - DNA, 657 bp, Artificial Sequence
  Description of Artificial Sequence: Synthetic polynucleotide
  murine IL-12a construct with a N terminal PhoA secretion tag
atgaaacagagtacgatagccctagccctgttgccgctcctgttcacccccgttactaaagcacgtaaccttccggtggccacgccagatccgggcatgttcccgtgcttacaccattcccagaatctgctgcgcgctgtgagtaatatgctgcagaaggcgagacaaactttggaattttacccgtgcacttcggaggagattgaccatgaggatatcacaaaagacaaaaccagtacagtggaagcctgcctgccccttgaactgactaaaaatgagagttgtttaaattcacgcgaaaccagcttcattactaacggaagctgcttagcatcgcggaaaaccagttttatgatggccctttgcctttcatctatttacgaggaccttaaaatgtatcaagttgaatttaagactatgaacgcgaaactgctaatggatcccaagcgacaaatctttcttgatcaaaatatgttggctgttattgatgaactgatgcaagccctgaattttaactcagaaaccgtacctcagaaatcgagtttagaagaacccgatttctacaaaactaaaatcaagttgtgtatccttttacatgccttccggattcgggccgtcactattgatcgcgtgatgtcgtacttgaatgcctcctaa

SEQ ID NO: 956 - DNA, 1005 bp, Artificial Sequence
  Description of Artificial Sequence: Synthetic polynucleotide
  murine IL-12b construct with a N terminal PhoA secretion tag
atgaaacagagcacgatcgcacttgcccttttgccgctgttatttaccccagtgacgaaagccatgtgggaattggaaaaagacgtgtatgttgttgaagttgactggactccggacgcgcctggtgaaactgttaatctgacttgtgatacaccggaggaagatgatataacttggactagcgatcaacgacacggcgtaatcggctctggtaagactttgaccattactgtgaaggaattcttggatgcggggcaatatacgtgtcataaaggcggcgagacgctgtcacactctcacctgttgttacataaaaaagagaatggtatatggtctacggagatcttgaaaaactttaaaaacaaaacttttttgaagtgtgaggctccaaactattctggtcgctttacctgtagttggttggtgcaacgtaacatggatctcaaatttaacataaagtcgtcttcgtcttctcccgatagccgagcggttacctgtggcatggctagtttgtcggcggagaaggtgaccttggatcaacgtgattatgaaaaatatagcgtttcgtgccaagaggacgttacgtgccctaccgctgaagagactttgccgattgaattggcactggaagcacgacaacaaaataaatacgagaattactcaactagtttcttcatccgagatatcataaaaccggaccccccgaagaatctgcaaatgaaaccgcttaaaaattcacaggtagaggtttcgtgggagtacccggatagttggtctacgcctcattcgtattttagcctgaaatttttcgttcgaatacagcgaaaaaaagagaagatgaaagaaactgaagaagggtgtaaccaaaaaggtgcatttctggtggagaaaactagcaccgaggttcaatgcaaaggcggtaacgtgtgcgtacaagctcaagaccgttattataacagtagctgttctaaatgggcttgcgtgccctgccgcgtgagatcatga

SEQ ID NO: 957 - DNA, 408 bp, Artificial Sequence
  Description of Artificial Sequence: Synthetic polynucleotide
  human Il-15 construct with a N terminal PhoA secretion tag
atgaagcaatctacgatcgcactagcgttactgccgttattgtttactcctgtgactaaggctaattgggttaatgttatatctgatttgaaaaaaatagaggatctgattcaatcaatgcacatagatgcgactctgtatactgagagcgatgtgcacccgagttgcaaagttactgctatgaaatgttttctgctggagctgcaagttatctctctggagagtggtgatgcgtctattcacgatactgttgagaatctgattattctggctaataactcgctgtcaagtaatgggaatgttacggaatctggctgtaaggagtgtgaagaattagaagaaaaaaatattaaagagtttctgcagagttttgtgcacattgttcagatgtttatcaatactagctga

SEQ ID NO: 958 - DNA, 447 bp, Artificial Sequence
  Description of Artificial Sequence: Synthetic polynucleotide
  human GMCSF construct with a N terminal PhoA secretion tag
atgaagcaatctacgatcgcgttggccttactgcccctgttattcacacccgtgaccaaagcggcaccggcccgcagcccatcaccgtcaactcaaccttgggaacatgtaaatgctattcaagaagctcgccgcctgttgaatttgagtcgcgatactgcagcagagatgaatgagactgtagaggtgatttcagaaatgtttgacctgcaggagccgacttgtttgcaaactcgcctggagctgtacaaacaaggcctgcgtggctcgctgactaaactgaaaggtcctctgacgatgatggcttctcattataaacaacactgcccgcctactccggagacgtcttgcgcgacccagataattacttttgaatcttttaaagagaatctgaaagactttctgctggttatcccgtttgattgttgggaaccggttcaagaataa

SEQ ID NO: 959 - DNA, 597 bp, Artificial Sequence
  Description of Artificial Sequence: Synthetic polynucleotide
  human TNFa construct with a N terminal PhoA secretion tag
atgaaacaatcaacgatcgctctggctctgcttccgctgctctttactccagttactaaagcgggtccgcagagggaagaattcccgcgcgatttgagcctgatttcacctcttgctcaggctgtccgctcctcttcgcgtaccccctcggataaacctgtcgcgcacgtggttgcgaacccgcaagcggaagggcagctgcaatggttaaaccgccgggctaatgcactgctggctaatggagttgagttacgcgacaaccaacttgtcgttccttcggaagggctgtatctgatctattcacaggttctctttaaagggcagggttgcccatcaacccacgtgctcctgacacacacgatcagtcgtatcgcggtatcctatcagacgaaagttaacctcctgtcagcgattaaatcgccgtgtcagagagaaactccagagggtgcggaagctaaaccgtggtatgaacctatttatcttggtggagttttccagttggaaaaaggtgatagactgtcggcagagatcaatcgccctgattacctggatttcgctgagtcgggtcaggtttatttcggaattattgcactgtga

SEQ ID NO: 960 - DNA, 480 bp, Artificial Sequence
  Description of Artificial Sequence: Synthetic polynucleotide
  human IFNg construct with a N terminal PhoA secretion tag
atgaagcaatctacgatagcactggcgttgctgccgctgctgttcaccccggttaccaaggcgcaggatccttacgttaaagaagcagagaatctgaaaaaatactttaatgcaggccacagcgatgtggcagataatggcacgttattcctgggcattctgaaaaattggaaagaagaatctgaccggaagatcatgcaatctcagatcgtatcattttatttcaagttgtttaaaaacttcaaggatgaccagtcgattcaaaaatcagtggaaacgatcaaagaagatatgaacgttaagttcttcaactcaaataaaaaaaaacgcgatgatttcgaaaaactgactaattattcggtaactgatttgaatgttcagcgcaaggcgattcatgaattgattcaggttatggcagaactgtcgccagcggcaaaaacgggtaaacgaaaacgttctcagatgttgtttcgtggttga

SEQ ID NO: 961-964 - skipped (4 entries)

SEQ ID NO: 965 - DNA, 2531 bp, Artificial Sequence
  Description of Artificial Sequence: Synthetic polynucleotide
  Ptet.phoA-hIL12b-phoA-hIL12a
ccaggatacatagattaccacaactccgagcccttccaccttaagacccactttcacatttaagttgtttttctaatccgcatatgatcaattcaaggccgaataagaaggctggctctgcaccttggtgatcaaataattcgatagcttgtcgtaataatggcggcatactatcagtagtaggtgtttccctttcttctttagcgacttgatgctcttgatcttccaatacgcaacctaaagtaaaatgccccacagcgctgagtgcatataatgcattctctagtgaaaaaccttgttggcataaaaaggctaattgattttcgagagtttcatactgtttttctgtaggccgtgtacctaaatgtacttttgctccatcgcgatgacttagtaaagcacatctaaaacttttagcgttattacgtaaaaaatcttgccagctttccccttctaaagggcaaaagtgagtatggtgcctatctaacatctcaatggctaaggcgtcgagcaaagcccgcttattttttacatgccaatacaatgtaggctgctctacacctagcttctgggcgagtttacgggttgttaaaccttcgattccgacctcattaagcagctctaatgcgctgttaatcactttacttttatctaatctagacatcattaattcctaatttttgttgacactctatcattgatagagttattttaccactccctatcagtgatagagaaaagtgaaataagtcataaatagggagtccaaaatgaagcagagcacgatcgcattggcgttgctaccgctgttgtttaccccggtcacaaaagccatctgggaactgaaaaaagatgtttatgtagttgaactggattggtacccggatgcacccggtgagatggtggttttgacctgcgacacgccggaagaagatggcataacgtggaccctggatcaaagctctgaagttctgggttcaggtaagacattgacgatccaagtaaaagaatttggcgacgcaggtcagtacacctgccacaaaggtggcgaagttctgtcgcactcactcctgctcctgcacaaaaaagaggatggcatctggagtactgatatcctaaaggatcaaaaagaacctaaaaacaaaacgttcttgcgctgtgaagcgaagaactatagtggtcgctttacgtgctggtggttgactaccatttccaccgatttgaccttttctgttaagagttcgcgcggctcgtcagatccgcagggcgttacttgcggtgcggcgacgctgtcagctgagagagttcgtggggacaacaaagagtacgaatatagtgtagaatgtcaagaggattcggcgtgcccggcagcagaggagtctctccccattgaagttatggtggacgcagtgcataaactgaaatatgagaattacacatcaagcttttttattcgcgatatcatcaaaccggatcctccaaaaaatctgcaactaaagcccctgaaaaattcgcgccaagttgaggtgagctgggaatatccggatacttggtcgacaccgcattcttatttctcactgaccttctgcgttcaggttcaaggtaaatcaaaacgagaaaaaaaggatcgcgtctttaccgacaaaacgtctgctactgtaatctgccgcaagaatgcgtcaatttctgtacgtgcgcaagatcgctactactctagtagttggtctgaatgggcttcagtgccatgctcctgatgagaaaccctacggaggaggttaatttatgaaacagagcacaattgctctggccttgttgccattactgtttacccctgttactaaggctaggaacctgcctgtggcaacaccagaccctgggatgttcccttgcttacatcattcccagaacctgttgcgtgcggtgtctaacatgctgcagaaagccaggcagacgctggaattctacccatgcacttccgaagagatagatcatgaagacattacgaaagacaaaacctcaacggttgaagcatgcttacctctggaattgactaagaatgaatcgtgcttaaactcaagagagaccagtttcatcactaatggctcttgcttagcgtcgcgcaagaccagcttcatgatggcgctctgcctaagtagcatctacgaggacctcaaaatgtaccaagttgaatttaaaactatgaatgccaaacttctaatggacccaaaaagacagatatttttagatcagaatatgcttgcggttattgacgaactcatgcaggcattgaattttaattccgagacggtgccacaaaaaagttctttggaggagccggacttttacaagacaaaaatcaagctgtgcatacttcttcacgcattcagaatacgggccgttacgatcgatcgcgtcatgtcgtatcttaatgcgagctgaaaataaaacgaaaggctcagtcgaaagactgggcctttcgttttatctgttggttccttatcatctggcgaatcggacccacaagagcactg

SEQ ID NO: 966 - DNA, 2549 bp, Artificial Sequence
  Description of Artificial Sequence: Synthetic polynucleotide
  Ptet.phoA-mIL12b-phoA-mIL12a
ccaggatacatagattaccacaactccgagcccttccaccttaagacccactttcacatttaagttgtttttctaatccgcatatgatcaattcaaggccgaataagaaggctggctctgcaccttggtgatcaaataattcgatagcttgtcgtaataatggcggcatactatcagtagtaggtgtttccctttcttctttagcgacttgatgctcttgatcttccaatacgcaacctaaagtaaaatgccccacagcgctgagtgcatataatgcattctctagtgaaaaaccttgttggcataaaaaggctaattgattttcgagagtttcatactgtttttctgtaggccgtgtacctaaatgtacttttgctccatcgcgatgacttagtaaagcacatctaaaacttttagcgttattacgtaaaaaatcttgccagctttccccttctaaagggcaaaagtgagtatggtgcctatctaacatctcaatggctaaggcgtcgagcaaagcccgcttattttttacatgccaatacaatgtaggctgctctacacctagcttctgggcgagtttacgggttgttaaaccttcgattccgacctcattaagcagctctaatgcgctgttaatcactttacttttatctaatctagacatcattaattcctaatttttgttgacactctatcattgatagagttattttaccactccctatcagtgatagagaaaagtgaatgttacacatctaaggagaaacattatgaaacagagcacgatcgcacttgcccttttgccgctgttatttaccccagtgacgaaagccatgtgggaattggaaaaagacgtgtatgttgttgaagttgactggactccggacgcgcctggtgaaactgttaatctgacttgtgatacaccggaggaagatgatataacttggactagcgatcaacgacacggcgtaatcggctctggtaagactttgaccattactgtgaaggaattcttggatgcggggcaatatacgtgtcataaaggcggcgagacgctgtcacactctcacctgttgttacataaaaaagagaatggtatatggtctacggagatcttgaaaaactttaaaaacaaaacttttttgaagtgtgaggctccaaactattctggtcgctttacctgtagttggttggtgcaacgtaacatggatctcaaatttaacataaagtcgtcttcgtcttctcccgatagccgagcggttacctgtggcatggctagtttgtcggcggagaaggtgaccttggatcaacgtgattatgaaaaatatagcgtttcgtgccaagaggacgttacgtgccctaccgctgaagagactttgccgattgaattggcactggaagcacgacaacaaaataaatacgagaattactcaactagtttcttcatccgagatatcataaaaccggaccccccgaagaatctgcaaatgaaaccgcttaaaaattcacaggtagaggtttcgtgggagtacccggatagttggtctacgcctcattcgtattttagcctgaaatttttcgttcgaatacagcgaaaaaaagagaagatgaaagaaactgaagaagggtgtaaccaaaaaggtgcatttctggtggagaaaactagcaccgaggttcaatgcaaaggcggtaacgtgtgcgtacaagctcaagaccgttattataacagtagctgttctaaatgggcttgcgtgccctgccgcgtgagatcatgagaagaagattattgaagaggtccgcatgaaacagagtacgatagccctagccctgttgccgctcctgttcacccccgttactaaagcacgtaaccttccggtggccacgccagatccgggcatgttcccgtgcttacaccattcccagaatctgctgcgcgctgtgagtaatatgctgcagaaggcgagacaaactttggaattttacccgtgcacttcggaggagattgaccatgaggatatcacaaaagacaaaaccagtacagtggaagcctgcctgccccttgaactgactaaaaatgagagttgtttaaattcacgcgaaaccagcttcattactaacggaagctgcttagcatcgcggaaaaccagttttatgatggccctttgcctttcatctatttacgaggaccttaaaatgtatcaagttgaatttaagactatgaacgcgaaactgctaatggatcccaagcgacaaatctttcttgatcaaaatatgttggctgttattgatgaactgatgcaagccctgaattttaactcagaaaccgtacctcagaaatcgagtttagaagaacccgatttctacaaaactaaaatcaagttgtgtatccttttacatgccttccggattcgggccgtcactattgatcgcgtgatgtcgtacttgaatgcctcctaaaaataaaacgaaaggctcagtcgaaagactgggcctttcgttttatctgttggttccttatcatctggcgaatcggacccacaagagcactg

SEQ ID NO: 967 - DNA, 1270 bp, Artificial Sequence
  Description of Artificial Sequence: Synthetic polynucleotide
  Ptet.phoA-IL15
ccaggatacatagattaccacaactccgagcccttccaccttaagacccactttcacatttaagttgtttttctaatccgcatatgatcaattcaaggccgaataagaaggctggctctgcaccttggtgatcaaataattcgatagcttgtcgtaataatggcggcatactatcagtagtaggtgtttccctttcttctttagcgacttgatgctcttgatcttccaatacgcaacctaaagtaaaatgccccacagcgctgagtgcatataatgcattctctagtgaaaaaccttgttggcataaaaaggctaattgattttcgagagtttcatactgtttttctgtaggccgtgtacctaaatgtacttttgctccatcgcgatgacttagtaaagcacatctaaaacttttagcgttattacgtaaaaaatcttgccagctttccccttctaaagggcaaaagtgagtatggtgcctatctaacatctcaatggctaaggcgtcgagcaaagcccgcttattttttacatgccaatacaatgtaggctgctctacacctagcttctgggcgagtttacgggttgttaaaccttcgattccgacctcattaagcagctctaatgcgctgttaatcactttacttttatctaatctagacatcattaattcctaatttttgttgacactctatcattgatagagttattttaccactccctatcagtgatagagaaaagtgaagatcaactcaagataaggaggatccatgaagcaatctacgatcgcactagcgttactgccgttattgtttactcctgtgactaaggctaattgggttaatgttatatctgatttgaaaaaaatagaggatctgattcaatcaatgcacatagatgcgactctgtatactgagagcgatgtgcacccgagttgcaaagttactgctatgaaatgttttctgctggagctgcaagttatctctctggagagtggtgatgcgtctattcacgatactgttgagaatctgattattctggctaataactcgctgtcaagtaatgggaatgttacggaatctggctgtaaggagtgtgaagaattagaagaaaaaaatattaaagagtttctgcagagttttgtgcacattgttcagatgtttatcaatactagctgaaaataaaacgaaaggctcagtcgaaagactgggcctttcgttttatctgttggttccttatcatctggcgaatcggacccacaagagcactg

SEQ ID NO: 968 - DNA, 1309 bp, Artificial Sequence
  Description of Artificial Sequence: Synthetic polynucleotide
  Ptet.phoA-GMCSF
ccaggatacatagattaccacaactccgagcccttccaccttaagacccactttcacatttaagttgtttttctaatccgcatatgatcaattcaaggccgaataagaaggctggctctgcaccttggtgatcaaataattcgatagcttgtcgtaataatggcggcatactatcagtagtaggtgtttccctttcttctttagcgacttgatgctcttgatcttccaatacgcaacctaaagtaaaatgccccacagcgctgagtgcatataatgcattctctagtgaaaaaccttgttggcataaaaaggctaattgattttcgagagtttcatactgtttttctgtaggccgtgtacctaaatgtacttttgctccatcgcgatgacttagtaaagcacatctaaaacttttagcgttattacgtaaaaaatcttgccagctttccccttctaaagggcaaaagtgagtatggtgcctatctaacatctcaatggctaaggcgtcgagcaaagcccgcttattttttacatgccaatacaatgtaggctgctctacacctagcttctgggcgagtttacgggttgttaaaccttcgattccgacctcattaagcagctctaatgcgctgttaatcactttacttttatctaatctagacatcattaattcctaatttttgttgacactctatcattgatagagttattttaccactccctatcagtgatagagaaaagtgaagaaagcaacaacatagggggaaagaatgaagcaatctacgatcgcgttggccttactgcccctgttattcacacccgtgaccaaagcggcaccggcccgcagcccatcaccgtcaactcaaccttgggaacatgtaaatgctattcaagaagctcgccgcctgttgaatttgagtcgcgatactgcagcagagatgaatgagactgtagaggtgatttcagaaatgtttgacctgcaggagccgacttgtttgcaaactcgcctggagctgtacaaacaaggcctgcgtggctcgctgactaaactgaaaggtcctctgacgatgatggcttctcattataaacaacactgcccgcctactccggagacgtcttgcgcgacccagataattacttttgaatcttttaaagagaatctgaaagactttctgctggttatcccgtttgattgttgggaaccggttcaagaataaaaataaaacgaaaggctcagtcgaaagactgggcctttcgttttatctgttggttccttatcatctggcgaatcggacccacaagagcactg

SEQ ID NO: 969 - DNA, 1459 bp, Artificial Sequence
  Description of Artificial Sequence: Synthetic polynucleotide
  Ptet-phoA-TNFa
ccaggatacatagattaccacaactccgagcccttccaccttaagacccactttcacatttaagttgtttttctaatccgcatatgatcaattcaaggccgaataagaaggctggctctgcaccttggtgatcaaataattcgatagcttgtcgtaataatggcggcatactatcagtagtaggtgtttccctttcttctttagcgacttgatgctcttgatcttccaatacgcaacctaaagtaaaatgccccacagcgctgagtgcatataatgcattctctagtgaaaaaccttgttggcataaaaaggctaattgattttcgagagtttcatactgtttttctgtaggccgtgtacctaaatgtacttttgctccatcgcgatgacttagtaaagcacatctaaaacttttagcgttattacgtaaaaaatcttgccagctttccccttctaaagggcaaaagtgagtatggtgcctatctaacatctcaatggctaaggcgtcgagcaaagcccgcttattttttacatgccaatacaatgtaggctgctctacacctagcttctgggcgagtttacgggttgttaaaccttcgattccgacctcattaagcagctctaatgcgctgttaatcactttacttttatctaatctagacatcattaattcctaatttttgttgacactctatcattgatagagttattttaccactccctatcagtgatagagaaaagtgaacacaacacagaaaggagggctgtccatgaaacaatcaacgatcgctctggctctgcttccgctgctctttactccagttactaaagcgggtccgcagagggaagaattcccgcgcgatttgagcctgatttcacctcttgctcaggctgtccgctcctcttcgcgtaccccctcggataaacctgtcgcgcacgtggttgcgaacccgcaagcggaagggcagctgcaatggttaaaccgccgggctaatgcactgctggctaatggagttgagttacgcgacaaccaacttgtcgttccttcggaagggctgtatctgatctattcacaggttctctttaaagggcagggttgcccatcaacccacgtgctcctgacacacacgatcagtcgtatcgcggtatcctatcagacgaaagttaacctcctgtcagcgattaaatcgccgtgtcagagagaaactccagagggtgcggaagctaaaccgtggtatgaacctatttatcttggtggagttttccagttggaaaaaggtgatagactgtcggcagagatcaatcgccctgattacctggatttcgctgagtcgggtcaggtttatttcggaattattgcactgtgaaaataaaacgaaaggctcagtcgaaagactgggcctttcgttttatctgttggttccttatcatctggcgaatcggacccacaagagcactg

SEQ ID NO: 970 - DNA, 1342 bp, Artificial Sequence
  Description of Artificial Sequence: Synthetic polynucleotide
  Ptet-phoA-IFNg
ccaggatacatagattaccacaactccgagcccttccaccttaagacccactttcacatttaagttgtttttctaatccgcatatgatcaattcaaggccgaataagaaggctggctctgcaccttggtgatcaaataattcgatagcttgtcgtaataatggcggcatactatcagtagtaggtgtttccctttcttctttagcgacttgatgctcttgatcttccaatacgcaacctaaagtaaaatgccccacagcgctgagtgcatataatgcattctctagtgaaaaaccttgttggcataaaaaggctaattgattttcgagagtttcatactgtttttctgtaggccgtgtacctaaatgtacttttgctccatcgcgatgacttagtaaagcacatctaaaacttttagcgttattacgtaaaaaatcttgccagctttccccttctaaagggcaaaagtgagtatggtgcctatctaacatctcaatggctaaggcgtcgagcaaagcccgcttattttttacatgccaatacaatgtaggctgctctacacctagcttctgggcgagtttacgggttgttaaaccttcgattccgacctcattaagcagctctaatgcgctgttaatcactttacttttatctaatctagacatcattaattcctaatttttgttgacactctatcattgatagagttattttaccactccctatcagtgatagagaaaagtgaacaccaccaccacgaggaggtaaaaaatgaagcaatctacgatagcactggcgttgctgccgctgctgttcaccccggttaccaaggcgcaggatccttacgttaaagaagcagagaatctgaaaaaatactttaatgcaggccacagcgatgtggcagataatggcacgttattcctgggcattctgaaaaattggaaagaagaatctgaccggaagatcatgcaatctcagatcgtatcattttatttcaagttgtttaaaaacttcaaggatgaccagtcgattcaaaaatcagtggaaacgatcaaagaagatatgaacgttaagttcttcaactcaaataaaaaaaaacgcgatgatttcgaaaaactgactaattattcggtaactgatttgaatgttcagcgcaaggcgattcatgaattgattcaggttatggcagaactgtcgccagcggcaaaaacgggtaaacgaaaacgttctcagatgttgtttcgtggttgaaaataaaacgaaaggctcagtcgaaagactgggcctttcgttttatctgttggttccttatcatctggcgaatcggacccacaagagcactg

SEQ ID NO: 971-974 - skipped (4 entries)

SEQ ID NO: 975 - DNA, 5100 bp, Artificial Sequence
  Description of Artificial Sequence: Synthetic polynucleotide
  ptet-J43scFv-V5-HIS (
agcgcccaatacgcaaaccgcctctccccgcgcgttggccgattcattaatgcagctggcacgacaggtttcccgactggaaagcgggcagtgagcgcaacgcaattaatgtgagttagctcactcattaggcaccccaggctttacactttatgcttccggctcgtatgttgtgtggaattgtgagcggataacaatttcacacaggaaacagctatgaccatgattacgccaagctatttaggtgacactatagaatactcaagctatgcatcaagcttggtaccgagctcggatccactagtaacggccgccagtgtgctggaattcgcccttttaagacccactttcacatttaagttgtttttctaatccgcagatgatcaattcaaggccgaataagaaggctggctctgcaccttggtgatcaaataattcgatagcttgtcgtaataatggcggcatactatcagtagtaggtgtttccctttcttctttagcgacttgatgctcttgatcttccaatacgcaacctaaagtaaaatgccccacagcgctgagtgcatataatgcattctctagtgaaaaaccttgttggcataaaaaggctaattgattttcgagagtttcatactgtttttctgtaggccgtgtacctaaatgtacttttgctccatcgcgatgacttagtaaagcacatctaaaacttttagcgttattacgtaaaaaatcttgccagctttccccttctaaagggcaaaagtgagtatggtgcctatctaacatctcaatggctaaggcgtcgagcaaagcccgcttattttttacatgccaatacaatgtaggctgctctacacctagcttctgggcgagtttacgggttgttaaaccttcgattccgacctcattaagcagctctaatgcgctgttaatcactttacttttatctaatctagacatcattaattcctaatttttgttgacactctatcattgatagagttattttaccactccctatcagtgatagagaaaagtgaaaggaggtaaattatgcaattggaagttcgcctgttggagagcggtggtggacttgtgaaacccgagggaagccttaaactttcgtgcgttgctagtgggttcacattttcagactatttcatgtcctgggtccgtcaagccccgggaaaaggacttgaatgggttgcccatatttacaccaagagctataactatgccacatactattctggaagcgttaaaggtcgttttaccatttcgcgtgacgacagccgttctatggtgtatttgcagatgaataaccttcgtacagaagatacggctacttactactgtactcgcgatggatcaggctatcccagtttagatttctggggacagggtactcaggttactgtttcaagcggtggaggcggctctggcggtggtgggagtggaggcggtggcagttacgagctgacgcagccaccctcggcaagtgtaaacgtgggcgaaacggtgaaaattacttgttcgggggatcaactgcccaaatacttcgccgattggtttcatcaacgttccgatcagactattttacaagtgatttatgatgataacaaacgtccgtcaggaatcccagagcgtatcagcggatcgagcagcggaacaacagcaactttgaccatccgcgatgtccgtgccgaagacgagggggactactattgtttctctggatacgtggactcagacagcaagctgtatgtttttggctcaggaacacaactgaccgtactgggcaagggcgagctcaattcgaagcttgaaggtaagcctatccctaaccctctcctcggcctcgattctacgcgtaccggtcatcatcaccatcaccattgagcatgcggtctcaggaggaagggcgaattctgcagatatccatcacactggcggccgctcgagcatgcatctagagggcccaattcgccctatagtgagtcgtattacaattcactggccgtcgttttacaacgtcgtgactgggaaaaccctggcgttacccaacttaatcgccttgcagcacatccccctttcgccagctggcgtaatagcgaagaggcccgcaccgatcgcccttcccaacagttgcgcagcctatacgtacggcagtttaaggtttacacctataaaagagagagccgttatcgtctgtttgtggatgtacagagtgatattattgacacgccggggcgacggatggtgatccccctggccagtgcacgtctgctgtcagataaagtctcccgtgaactttacccggtggtgcatatcggggatgaaagctggcgcatgatgaccaccgatatggccagtgtgccggtctccgttatcggggaagaagtggctgatctcagccaccgcgaaaatgacatcaaaaacgccattaacctgatgttctggggaatataaatgtcaggcatgagattatcaaaaaggatcttcacctagatccttttcacgtagaaagccagtccgcagaaacggtgctgaccccggatgaatgtcagctactgggctatctggacaagggaaaacgcaagcgcaaagagaaagcaggtagcttgcagtgggcttacatggcgatagctagactgggcggttttatggacagcaagcgaaccggaattgccagctggggcgccctctggtaaggttgggaagccctgcaaagtaaactggatggctttctcgccgccaaggatctgatggcgcaggggatcaagctctgatcaagagacaggatgaggatcgtttcgcatgattgaacaagatggattgcacgcaggttctccggccgcttgggtggagaggctattcggctatgactgggcacaacagacaatcggctgctctgatgccgccgtgttccggctgtcagcgcaggggcgcccggttctttttgtcaagaccgacctgtccggtgccctgaatgaactgcaagacgaggcagcgcggctatcgtggctggccacgacgggcgttccttgcgcagctgtgctcgacgttgtcactgaagcgggaagggactggctgctattgggcgaagtgccggggcaggatctcctgtcatctcaccttgctcctgccgagaaagtatccatcatggctgatgcaatgcggcggctgcatacgcttgatccggctacctgcccattcgaccaccaagcgaaacatcgcatcgagcgagcacgtactcggatggaagccggtcttgtcgatcaggatgatctggacgaagagcatcaggggctcgcgccagccgaactgttcgccaggctcaaggcgagcatgcccgacggcgaggatctcgtcgtgacccatggcgatgcctgcttgccgaatatcatggtggaaaatggccgcttttctggattcatcgactgtggccggctgggtgtggcggaccgctatcaggacatagcgttggctacccgtgatattgctgaagagcttggcggcgaatgggctgaccgcttcctcgtgctttacggtatcgccgctcccgattcgcagcgcatcgccttctatcgccttcttgacgagttcttctgaattattaacgcttacaatttcctgatgcggtattttctccttacgcatctgtgcggtatttcacaccgcatacaggtggcacttttcggggaaatgtgcgcggaacccctatttgtttatttttctaaatacattcaaatatgtatccgctcatgagacaataaccctgataaatgcttcaataatagcacgtgaggagggccaccatggccaagttgaccagtgccgttccggtgctcaccgcgcgcgacgtcgccggagcggtcgagttctggaccgaccggctcgggttctcccgggacttcgtggaggacgacttcgccggtgtggtccgggacgacgtgaccctgttcatcagcgcggtccaggaccaggtggtgccggacaacaccctggcctgggtgtgggtgcgcggcctggacgagctgtacgccgagtggtcggaggtcgtgtccacgaacttccgggacgcctccgggccggccatgaccgagatcggcgagcagccgtgggggcgggagttcgccctgcgcgacccggccggcaactgcgtgcacttcgtggccgaggagcaggactgacacgtgctaaaacttcatttttaatttaaaaggatctaggtgaagatcctttttgataatctcatgaccaaaatcccttaacgtgagttttcgttccactgagcgtcagaccccgtagaaaagatcaaaggatcttcttgagatcctttttttctgcgcgtaatctgctgcttgcaaacaaaaaaaccaccgctaccagcggtggtttgtttgccggatcaagagctaccaactctttttccgaaggtaactggcttcagcagagcgcagataccaaatactgtccttctagtgtagccgtagttaggccaccacttcaagaactctgtagcaccgcctacatacctcgctctgctaatcctgttaccagtggctgctgccagtggcgataagtcgtgtcttaccgggttggactcaagacgatagttaccggataaggcgcagcggtcgggctgaacggggggttcgtgcacacagcccagcttggagcgaacgacctacaccgaactgagatacctacagcgtgagctatgagaaagcgccacgcttcccgaagggagaaaggcggacaggtatccggtaagcggcagggtcggaacaggagagcgcacgagggagcttccagggggaaacgcctggtatctttatagtcctgtcgggtttcgccacctctgacttgagcgtcgatttttgtgatgctcgtcaggggggcggagcctatggaaaaacgccagcaacgcggcctttttacggttcctgggcttttgctggccttttgctcacatgttctttcctgcgttatcccctgattctgtggataaccgtattaccgcctttgagtgagctgataccgctcgccgcagccgaacgaccgagcgcagcgagtcagtgagcgaggaagcggaag

SEQ ID NO: 976 - DNA, 846 bp, Artificial Sequence
  Description of Artificial Sequence: Synthetic polynucleotide
  J43-Anti-PD1-scFv-V5-HIS
atgcaattggaagttcgcctgttggagagcggtggtggacttgtgaaacccgagggaagccttaaactttcgtgcgttgctagtgggttcacattttcagactatttcatgtcctgggtccgtcaagccccgggaaaaggacttgaatgggttgcccatatttacaccaagagctataactatgccacatactattctggaagcgttaaaggtcgttttaccatttcgcgtgacgacagccgttctatggtgtatttgcagatgaataaccttcgtacagaagatacggctacttactactgtactcgcgatggatcaggctatcccagtttagatttctggggacagggtactcaggttactgtttcaagcggtggaggcggctctggcggtggtgggagtggaggcggtggcagttacgagctgacgcagccaccctcggcaagtgtaaacgtgggcgaaacggtgaaaattacttgttcgggggatcaactgcccaaatacttcgccgattggtttcatcaacgttccgatcagactattttacaagtgatttatgatgataacaaacgtccgtcaggaatcccagagcgtatcagcggatcgagcagcggaacaacagcaactttgaccatccgcgatgtccgtgccgaagacgagggggactactattgtttctctggatacgtggactcagacagcaagctgtatgtttttggctcaggaacacaactgaccgtactgggcaagggcgagctcaattcgaagcttgaaggtaagcctatccctaaccctctcctcggcctcgattctacgcgtaccggtcatcatcaccatcaccattga

SEQ ID NO: 977 - DNA, 363 bp, Artificial Sequence
  Description of Artificial Sequence: Synthetic polynucleotide
  scFvHeavy chain
gaagttcgcctgttggagagcggtggtggacttgtgaaacccgagggaagccttaaactttcgtgcgttgctagtgggttcacattttcagactatttcatgtcctgggtccgtcaagccccgggaaaaggacttgaatgggttgcccatatttacaccaagagctataactatgccacatactattctggaagcgttaaaggtcgttttaccatttcgcgtgacgacagccgttctatggtgtatttgcagatgaataaccttcgtacagaagatacggctacttactactgtactcgcgatggatcaggctatcccagtttagatttctggggacagggtactcaggttactgtttcaagc

SEQ ID NO: 978 - DNA, 330 bp, Artificial Sequence
  Description of Artificial Sequence: Synthetic polynucleotide
  scFvLight chain
tacgagctgacgcagccaccctcggcaagtgtaaacgtgggcgaaacggtgaaaattacttgttcgggggatcaactgcccaaatacttcgccgattggtttcatcaacgttccgatcagactattttacaagtgatttatgatgataacaaacgtccgtcaggaatcccagagcgtatcagcggatcgagcagcggaacaacagcaactttgaccatccgcgatgtccgtgccgaagacgagggggactactattgtttctctggatacgtggactcagacagcaagctgtatgtttttggctcaggaacacaactgaccgtactgggc

SEQ ID NO: 979 - DNA, 45 bp, Artificial Sequence
  Description of Artificial Sequence: Synthetic oligonucleotide
  scFvLinker
ggtggaggcggctctggcggtggtgggagtggaggcggtggcagt

SEQ ID NO: 980 - protein, 281 aa, Artificial Sequence
  Description of Artificial Sequence: Synthetic polypeptide
  J43-Anti-PD1-scFV polypeptide sequence
MQLEVRLLESGGGLVKPEGSLKLSCVASGFTFSDYFMSWVRQAPGKGLEWVAHIYTKSYNYATYYSGSVKGRFTISRDDSRSMVYLQMNNLRTEDTATYYCTRDGSGYPSLDFWGQGTQVTVSSGGGGSGGGGSGGGGSYELTQPPSASVNVGETVKITCSGDQLPKYFADWFHQRSDQTILQVIYDDNKRPSGIPERISGSSSGTTATLTIRDVRAEDEGDYYCFSGYVDSDSKLYVFGSGTQLTVLGKGELNSKLEGKPIPNPLLGLDSTRTGHHHHHH

SEQ ID NO: 981 - DNA, 1668 bp, Artificial Sequence
  Description of Artificial Sequence: Synthetic polynucleotide
  Ptet-phoA-FLAG-J43-scFv-V5-HIS
ttaagacccactttcacatttaagttgtttttctaatccgcagatgatcaattcaaggccgaataagaaggctggctctgcaccttggtgatcaaataattcgatagcttgtcgtaataatggcggcatactatcagtagtaggtgtttccctttcttctttagcgacttgatgctcttgatcttccaatacgcaacctaaagtaaaatgccccacagcgctgagtgcatataatgcattctctagtgaaaaaccttgttggcataaaaaggctaattgattttcgagagtttcatactgtttttctgtaggccgtgtacctaaatgtacttttgctccatcgcgatgacttagtaaagcacatctaaaacttttagcgttattacgtaaaaaatcttgccagctttccccttctaaagggcaaaagtgagtatggtgcctatctaacatctcaatggctaaggcgtcgagcaaagcccgcttattttttacatgccaatacaatgtaggctgctctacacctagcttctgggcgagtttacgggttgttaaaccttcgattccgacctcattaagcagctctaatgcgctgttaatcactttacttttatctaatctagacataattaattcctaatttttgttgacactctatcattgatagagttattttaccactccctatcagtgatagagaaaagtgaaaggaggtaaattatgactagtaaacaatcgaccatcgcattggcgctgcttcctctattgttcacaccggtgacaaaggcagtcgactataaggatgacgacgacaagcaattgggcggtggcatggaagttcgcctgttggagagcggtggaggacttgtgaagcccgagggaagccttaaactttcgtgcgttgctagtgggttcacattttcagactatttcatgtcctgggtccgtcaagccccgggaaaaggacttgaatgggttgcccatatttacaccaagagctataactatgccacatactattctggaagcgttaaaggtcgttttaccatttcgcgtgacgacagccgttctatggtgtatttgcagatgaataaccttcgtacagaagatacggctacttactactgtactcgcgatggatcaggctatcccagtttagatttctggggacagggtactcaggttactgtttcaagcggtggaggcggctctggcggtggtgggagtggaggcggtggcagttacgagctgacgcagccgccctcggcaagtgtaaacgtgggcgaaacggtgaaaattacttgttcgggggatcaactgcccaaatacttcgccgattggtttcatcaacgttccgatcagactattttacaagtgatttatgatgataacaaacgtccgtcaggaatcccagagcgtatcagcggatcgagcagcggaacaacagcaactttgaccatccgcgatgtccgtgccgaagacgagggggactactattgtttctctggatacgtggactcagacagcaagctgtatgtttttggctcaggaacacaactgaccgtactgggcaagggcgagctcaattcgaagcttgaaggtaagcctatccctaaccctctcctcggactcgattctacgggatccggtcatcatcaccatcaccattga

SEQ ID NO: 982 - protein, 313 aa, Artificial Sequence
  Description of Artificial Sequence: Synthetic polypeptide
  phoA-FLAG-J43-scFv-V5-HIS
KQSTIALALLPLLFTPVTKAVDYKDDDDKQLGGGMEVRLLESGGGLVKPEGSLKLSCVASGFTFSDYFMSWVRQAPGKGLEWVAHIYTKSYNYATYYSGSVKGRFTISRDDSRSMVYLQMNNLRTEDTATYYCTRDGSGYPSLDFWGQGTQVTVSSGGGGSGGGGSGGGGSYELTQPPSASVNVGETVKITCSGDQLPKYFADWFHQRSDQTILQVIYDDNKRPSGIPERISGSSSGTTATLTIRDVRAEDEGDYYCFSGYVDSDSKLYVFGSGTQLTVLGKGELNSKLEGKPIPNPLLGLDSTGSGHHHHHH

SEQ ID NO: 983 - DNA, 1674 bp, Artificial Sequence
  Description of Artificial Sequence: Synthetic polynucleotide
  Ptet-ompF-FLAG-J43-scFv-V5-HIS
ttaagacccactttcacatttaagttgtttttctaatccgcagatgatcaattcaaggccgaataagaaggctggctctgcaccttggtgatcaaataattcgatagcttgtcgtaataatggcggcatactatcagtagtaggtgtttccctttcttctttagcgacttgatgctcttgatcttccaatacgcaacctaaagtaaaatgccccacagcgctgagtgcatataatgcattctctagtgaaaaaccttgttggcataaaaaggctaattgattttcgagagtttcatactgtttttctgtaggccgtgtacctaaatgtacttttgctccatcgcgatgacttagtaaagcacatctaaaacttttagcgttattacgtaaaaaatcttgccagctttccccttctaaagggcaaaagtgagtatggtgcctatctaacatctcaatggctaaggcgtcgagcaaagcccgcttattttttacatgccaatacaatgtaggctgctctacacctagcttctgggcgagtttacgggttgttaaaccttcgattccgacctcattaagcagctctaatgcgctgttaatcactttacttttatctaatctagacatcattaattcctaatttttgttgacactctatcattgatagagttattttaccactccctatcagtgatagagaaaagtgaaaggaggtaaattatgactagtatgatgaagcgtaacatcttagccgttattgtccccgcattgcttgtggccgggacggctaacgcagtcgactataaggatgacgacgacaagcaattgggcggtggcatggaagttcgcctgttggagagcggtggaggacttgtgaagcccgagggaagccttaaactttcgtgcgttgctagtgggttcacattttcagactatttcatgtcctgggtccgtcaagccccgggaaaaggacttgaatgggttgcccatatttacaccaagagctataactatgccacatactattctggaagcgttaaaggtcgttttaccatttcgcgtgacgacagccgttctatggtgtatttgcagatgaataaccttcgtacagaagatacggctacttactactgtactcgcgatggatcaggctatcccagtttagatttctggggacagggtactcaggttactgtttcaagcggtggaggcggctctggcggtggtgggagtggaggcggtggcagttacgagctgacgcagccgccctcggcaagtgtaaacgtgggcgaaacggtgaaaattacttgttcgggggatcaactgcccaaatacttcgccgattggtttcatcaacgttccgatcagactattttacaagtgatttatgatgataacaaacgtccgtcaggaatcccagagcgtatcagcggatcgagcagcggaacaacagcaactttgaccatccgcgatgtccgtgccgaagacgagggggactactattgtttctctggatacgtggactcagacagcaagctgtatgtttttggctcaggaacacaactgaccgtactgggcaagggcgagctcaattcgaagcttgaaggtaagcctatccctaaccctctcctcggactcgattctacgggatccggtcatcatcaccatcaccattga

SEQ ID NO: 984 - protein, 315 aa, Artificial Sequence
  Description of Artificial Sequence: Synthetic polypeptide
  ompF-FLAG-J43-scFv-V5-HIS
MMKRNILAVIVPALLVAGTANAVDYKDDDDKQLGGGMEVRLLESGGGLVKPEGSLKLSCVASGFTFSDYFMSWVRQAPGKGLEWVAHIYTKSYNYATYYSGSVKGRFTISRDDSRSMVYLQMNNLRTEDTATYYCTRDGSGYPSLDFWGQGTQVTVSSGGGGSGGGGSGGGGSYELTQPPSASVNVGETVKITCSGDQLPKYFADWFHQRSDQTILQVIYDDNKRPSGIPERISGSSSGTTATLTIRDVRAEDEGDYYCFSGYVDSDSKLYVFGSGTQLTVLGKGELNSKLEGKPIPNPLLGLDSTGSGHHHHHH

SEQ ID NO: 985 - DNA, 1668 bp, Artificial Sequence
  Description of Artificial Sequence: Synthetic polynucleotide
  Ptet-PelB-FLAG-J43-scFv-V5-HIS
ttaagacccactttcacatttaagttgtttttctaatccgcagatgatcaattcaaggccgaataagaaggctggctctgcaccttggtgatcaaataattcgatagcttgtcgtaataatggcggcatactatcagtagtaggtgtttccctttcttctttagcgacttgatgctcttgatcttccaatacgcaacctaaagtaaaatgccccacagcgctgagtgcatataatgcattctctagtgaaaaaccttgttggcataaaaaggctaattgattttcgagagtttcatactgtttttctgtaggccgtgtacctaaatgtacttttgctccatcgcgatgacttagtaaagcacatctaaaacttttagcgttattacgtaaaaaatcttgccagctttccccttctaaagggcaaaagtgagtatggtgcctatctaacatctcaatggctaaggcgtcgagcaaagcccgcttattttttacatgccaatacaatgtaggctgctctacacctagcttctgggcgagtttacgggttgttaaaccttcgattccgacctcattaagcagctctaatgcgctgttaatcactttacttttatctaatctagacatcattaattcctaatttttgttgacactctatcattgatagagttattttaccactccctatcagtgatagagaaaagtgaaaggaggtaaattatgactagtaaatatcttcttccaacggctgctgctggtttattgcttcttgccgcccagcctgcgatggctgtcgactataaggatgacgacgacaagcaattgggcggtggcatggaagttcgcctgttggagagcggtggaggacttgtgaagcccgagggaagccttaaactttcgtgcgttgctagtgggttcacattttcagactatttcatgtcctgggtccgtcaagccccgggaaaaggacttgaatgggttgcccatatttacaccaagagctataactatgccacatactattctggaagcgttaaaggtcgttttaccatttcgcgtgacgacagccgttctatggtgtatttgcagatgaataaccttcgtacagaagatacggctacttactactgtactcgcgatggatcaggctatcccagtttagatttctggggacagggtactcaggttactgtttcaagcggtggaggcggctctggcggtggtgggagtggaggcggtggcagttacgagctgacgcagccgccctcggcaagtgtaaacgtgggcgaaacggtgaaaattacttgttcgggggatcaactgcccaaatacttcgccgattggtttcatcaacgttccgatcagactattttacaagtgatttatgatgataacaaacgtccgtcaggaatcccagagcgtatcagcggatcgagcagcggaacaacagcaactttgaccatccgcgatgtccgtgccgaagacgagggggactactattgtttctctggatacgtggactcagacagcaagctgtatgtttttggctcaggaacacaactgaccgtactgggcaagggcgagctcaattcgaagcttgaaggtaagcctatccctaaccctctcctcggactcgattctacgggatccggtcatcatcaccatcaccat

SEQ ID NO: 986 - protein, 314 aa, Artificial Sequence
  Description of Artificial Sequence: Synthetic polypeptide
  PelB-FLAG-J43-scFv-V5-HIS
KYLLPTAAAGLLLLAAQPAMAVDYKDDDDKQLGGGMEVRLLESGGGLVKPEGSLKLSCVASGFTFSDYFMSWVRQAPGKGLEWVAHIYTKSYNYATYYSGSVKGRFTISRDDSRSMVYLQMNNLRTEDTATYYCTRDGSGYPSLDFWGQGTQVTVSSGGGGSGGGGSGGGGSYELTQPPSASVNVGETVKITCSGDQLPKYFADWFHQRSDQTILQVIYDDNKRPSGIPERISGSSSGTTATLTIRDVRAEDEGDYYCFSGYVDSDSKLYVFGSGTQLTVLGKGELNSKLEGKPIPNPLLGLDSTGSGHHHHHH

SEQ ID NO: 987 - DNA, 5708 bp, Artificial Sequence
  Description of Artificial Sequence: Synthetic polynucleotide
  p15A-Kan-ptet-Invasin-FLAG-J43scFv-V5-HIS
tagcggagtgtatactggcttactatgttggcactgatgagggtgtcagtgaagtgcttcatgtggcaggagaaaaaaggctgcaccggtgcgtcagcagaatatgtgatacaggatatattccgcttcctcgctcactgactcgctacgctcggtcgttcgactgcggcgagcggaaatggcttacgaacggggcggagatttcctggaagatgccaggaagatacttaacagggaagtgagagggccgcggcaaagccgtttttccataggctccgcccccctgacaagcatcacgaaatctgacgctcaaatcagtggtggcgaaacccgacaggactataaagataccaggcgtttcccctggcggctccctcgtgcgctctcctgttcctgcctttcggtttaccggtgtcattccgctgttatggccgcgtttgtctcattccacgcctgacactcagttccgggtaggcagttcgctccaagctggactgtatgcacgaaccccccgttcagtccgaccgctgcgccttatccggtaactatcgtcttgagtccaacccggaaagacatgcaaaagcaccactggcagcagccactggtaattgatttagaggagttagtcttgaagtcatgcgccggttaaggctaaactgaaaggacaagttttggtgactgcgctcctccaagccagttacctcggttcaaagagttggtagctcagagaaccttcgaaaaaccgccctgcaaggcggttttttcgttttcagagcaagagattacgcgcagaccaaaacgatctcaagaagatcatcttattaaggggtctgacgctcagtggaacggtgcaccctgcagggctagctgataaagcgttcgcgctgcattcggcagtttaagacccactttcacatttaagttgtttttctaatccgcatatgatcaattcaaggccgaataagaaggctggctctgcaccttggtgatcaaataattcgatagcttgtcgtaataatggcggcatactatcagtagtaggtgtttccctttcttctttagcgacttgatgctcttgatcttccaatacgcaacctaaagtaaaatgccccacagcgctgagtgcatataatgcattctctagtgaaaaaccttgttggcataaaaaggctaattgattttcgagagtttcatactgtttttctgtaggccgtgtacctaaatgtacttttgctccatcgcgatgacttagtaaagcacatctaaaacttttagcgttattacgtaaaaaatcttgccagctttccccttctaaagggcaaaagtgagtatggtgcctatctaacatctcaatggctaaggcgtcgagcaaagcccgcttattttttacatgccaatacaatgtaggctgctctacacctagcttctgggcgagtttacgggttgttaaaccttcgattccgacctcattaagcagctctaatgcgctgttaatcactttacttttatctaatctagacatcattaattcctaatttttgttgacactctatcattgatagagttattttaccactccctatcagtgatagagaaaagtgaaaggaggtaaattatgactagtatggttttccaacccatcagcgaatttttgctgattcgtaacgctgggatgtccatgtattttaacaagatcatttcttttaacatcatttcacgtatcgttatttgcatttttcttatctgtggtatgttcatggccggtgcatctgaaaagtatgatgcaaacgcaccccaacaggtgcagccatactcggtttcatcatcagcgttcgagaatctgcaccccaataacgagatggagtcgagtatcaacccttttagtgcttcggacaccgagcgtaatgcagctatcatcgatcgtgctaacaaggaacaagaaacggaagcagtcaacaaaatgatctccactggcgctcgtttagctgccagcggtcgcgcgtccgatgtggcgcacagtatggtaggggatgcggtcaaccaggagattaaacaatggctgaatcgcttcggcactgctcaagtgaatttaaattttgacaagaacttctcgttaaaggagtcttcgcttgactggttggccccatggtacgattcggcgtcattccttttcttttctcagttgggcatccgtaacaaggacagtcgtaatacacttaaccttggtgttggcattcgcacattagaaaatggttggttgtatggcctgaacaccttttacgacaatgacttaacgggacacaatcaccgtatcgggctgggcgccgaggcgtggactgactacttgcagttagccgcgaatgggtacttccgtcttaatggttggcactcttcccgtgacttcagcgactacaaagaacgccctgctaccgggggagatttgcgtgcgaatgcgtacctgcccgctcttccgcaacttggcgggaagttaatgtatgagcagtatactggggaacgcgtggctctgttcggaaaggacaacctgcagcgcaacccatacgctgtcactgcgggtatcaactatacgccagttccgttgctgacggtcggcgtggatcaacgtatggggaagtcgagtaaacatgaaacgcaatggaatttacaaatgaactatcgcttaggggagagtttccaaagtcagcttagcccttcggcggtcgcagggactcgtttgcttgctgagtcccgctacaacctggttgatcgcaataacaatatcgtactggaataccagaaacaacaagtggttaagctgacgttgagccctgcgaccatcagtggattgcccggacaagtttaccaggtaaatgcccaggtccagggggcctctgcggttcgcgaaattgtctggtcagacgcagaattaatcgctgcaggaggcaccttaacgccactttccactacacaattcaatttagtccttcccccatacaaacgtaccgcccaggtatcgcgcgtaactgatgacttaactgctaatttttattcactgtcggcgttagcagttgaccatcaaggcaaccgtagtaattccttcacattatctgtaacggtgcagcagccgcaactgacgcttaccgcagcggtcattggtgatggggccccagctaatgggaaaaccgcaatcactgtcgagttcacagttgcagattttgaaggcaagccgctggcgggtcaggaggttgtgattacgactaataacggtgctcttcctaataagattactgaaaagactgacgctaacggcgttgcccgcattgcccttacgaacacaaccgatggggtcacggtagttaccgcagaggtcgaggggcaacgccaatccgttgacacgcacttcgttaagggtactatcgcggccgataaaagcacgctggccgcggtcgactataaggatgacgacgacaagcaattggaagttcgcctgttggagagcggtggtggacttgtgaaacccgagggaagccttaaactttcgtgcgttgctagtgggttcacattttcagactatttcatgtcctgggtccgtcaagccccgggaaaaggacttgaatgggttgcccatatttacaccaagagctataactatgccacatactattctggaagcgttaaaggtcgttttaccatttcgcgtgacgacagccgttctatggtgtatttgcagatgaataaccttcgtacagaagatacggctacttactactgtactcgcgatggatcaggctatcccagtttagatttctggggacagggtactcaggttactgtttcaagcggtggaggcggctctggcggtggtgggagtggaggcggtggcagttacgagctgacgcagccaccctcggcaagtgtaaacgtgggcgaaacggtgaaaattacttgttcgggggatcaactgcccaaatacttcgccgattggtttcatcaacgttccgatcagactattttacaagtgatttatgatgataacaaacgtccgtcaggaatcccagagcgtatcagcggatcgagcagcggaacaacagcaactttgaccatccgcgatgtccgtgccgaagacgagggggactactattgtttctctggatacgtggactcagacagcaagctgtatgtttttggctcaggaacacaactgaccgtactgggcaagggcgagctcaattcgaagcttgaaggtaagcctatccctaaccctctcctcggcctcgattctacgcgtaccggtcatcatcaccatcaccattgagcatgctaatcagccgtggaattcgcaacgtaaaaaaacccgccccggcgggtttttttataccggtctcaggaggaacgattggtaaacccggtgaacgcatgagaaagcccccggaagatcaccttccgggggcttttttattgcgcggaccaaaacgaaaaaagacgctcgaaagcgtctcttttctggaatttggtaccgaggcgtaatgctctgccagtgttacaaccaattaaccaattctgattagaaaaactcatcgagcatcaaatgaaactgcaatttattcatatcaggattatcaataccatatttttgaaaaagccgtttctgtaatgaaggagaaaactcaccgaggcagttccataggatggcaagatcctggtatcggtctgcgattccgactcgtccaacatcaatacaacctattaatttcccctcgtcaaaaataaggttatcaagtgagaaatcaccatgagtgacgactgaatccggtgagaatggcaaaagcttatgcatttctttccagacttgttcaacaggccagccattacgctcgtcatcaaaatcactcgcatcaaccaaaccgttattcattcgtgattgcgcctgagcgagacgaaatacgcgatcgctgttaaaaggacaattacaaacaggaatcgaatgcaaccggcgcaggaacactgccagcgcatcaacaatattttcacctgaatcaggatattcttctaatacctggaatgctgttttcccggggatcgcagtggtgagtaaccatgcatcatcaggagtacggataaaatgcttgatggtcggaagaggcataaattccgtcagccagtttagtctgaccatctcatctgtaacatcattggcaacgctacctttgccatgtttcagaaacaactctggcgcatcgggcttcccatacaatcgatagattgtcgcacctgattgcccgacattatcgcgagcccatttatacccatataaatcagcatccatgttggaatttaatcgcggcctcgagcaagacgtttcccgttgaatatggctcataacaccccttgtattactgtttatgtaagcagacagttttattgttcatgatgatatatttttatcttgtgcaatgtaacatcagagattttgagacacaacgtggctttgttgaataaatcgaacttttgctgagttgaaggatcagatcacgcatcttcccgacaacgcagaccgttccgtggcaaagcaaaagttcaaaatcaccaactggtccacctacaacaaagctctcatcaaccgtggctccctcactttctggctggatgatggggcgattcaggcctggtatgagtcagcaacaccttcttcacgaggcagacctcagcgc

SEQ ID NO: 988 - DNA, 4282 bp, Artificial Sequence
  Description of Artificial Sequence: Synthetic polynucleotide
  p15A-Kan-ptet-LppOmpA-FLAG-J43scFv-V5-HIS
tagcggagtgtatactggcttactatgttggcactgatgagggtgtcagtgaagtgcttcatgtggcaggagaaaaaaggctgcaccggtgcgtcagcagaatatgtgatacaggatatattccgcttcctcgctcactgactcgctacgctcggtcgttcgactgcggcgagcggaaatggcttacgaacggggcggagatttcctggaagatgccaggaagatacttaacagggaagtgagagggccgcggcaaagccgtttttccataggctccgcccccctgacaagcatcacgaaatctgacgctcaaatcagtggtggcgaaacccgacaggactataaagataccaggcgtttcccctggcggctccctcgtgcgctctcctgttcctgcctttcggtttaccggtgtcattccgctgttatggccgcgtttgtctcattccacgcctgacactcagttccgggtaggcagttcgctccaagctggactgtatgcacgaaccccccgttcagtccgaccgctgcgccttatccggtaactatcgtcttgagtccaacccggaaagacatgcaaaagcaccactggcagcagccactggtaattgatttagaggagttagtcttgaagtcatgcgccggttaaggctaaactgaaaggacaagttttggtgactgcgctcctccaagccagttacctcggttcaaagagttggtagctcagagaaccttcgaaaaaccgccctgcaaggcggttttttcgttttcagagcaagagattacgcgcagaccaaaacgatctcaagaagatcatcttattaaggggtctgacgctcagtggaacggtgcaccctgcagggctagctgataaagcgttcgcgctgcattcggcagtttaagacccactttcacatttaagttgtttttctaatccgcatatgatcaattcaaggccgaataagaaggctggctctgcaccttggtgatcaaataattcgatagcttgtcgtaataatggcggcatactatcagtagtaggtgtttccctttcttctttagcgacttgatgctcttgatcttccaatacgcaacctaaagtaaaatgccccacagcgctgagtgcatataatgcattctctagtgaaaaaccttgttggcataaaaaggctaattgattttcgagagtttcatactgtttttctgtaggccgtgtacctaaatgtacttttgctccatcgcgatgacttagtaaagcacatctaaaacttttagcgttattacgtaaaaaatcttgccagctttccccttctaaagggcaaaagtgagtatggtgcctatctaacatctcaatggctaaggcgtcgagcaaagcccgcttattttttacatgccaatacaatgtaggctgctctacacctagcttctgggcgagtttacgggttgttaaaccttcgattccgacctcattaagcagctctaatgcgctgttaatcactttacttttatctaatctagacatcattaattcctaatttttgttgacactctatcattgatagagttattttaccactccctatcagtgatagagaaaagtgaaaggaggtaaattatgactagtaaagcaacaaaacttgtgttaggcgcggttatacttggctccaccctgcttgcaggttgctcgtctaacgcgaagatcgaccagggtatcaatccttacgtcgggtttgaaatgggatacgattggttgggacgtatgccttataagggaagtgttgaaaacggcgcttataaggcgcagggagtacagttaacggccaagcttgggtaccccataacagacgatttagatatttatacccgtttaggaggaatggtttggagagccgacacgaagtctaatgtatatggtaagaaccacgacacgggagtatcccccgtctttgcagggggagtggaatatgctatcacaccagagatcgctacccgtttggaatatcaatggacgaataatataggcgacgcccatacgataggaacgcggcccgacaacggcatccctggggtcgactataaggatgacgacgacaagcaattggaagttcgcctgttggagagcggtggtggacttgtgaaacccgagggaagccttaaactttcgtgcgttgctagtgggttcacattttcagactatttcatgtcctgggtccgtcaagccccgggaaaaggacttgaatgggttgcccatatttacaccaagagctataactatgccacatactattctggaagcgttaaaggtcgttttaccatttcgcgtgacgacagccgttctatggtgtatttgcagatgaataaccttcgtacagaagatacggctacttactactgtactcgcgatggatcaggctatcccagtttagatttctggggacagggtactcaggttactgtttcaagcggtggaggcggctctggcggtggtgggagtggaggcggtggcagttacgagctgacgcagccaccctcggcaagtgtaaacgtgggcgaaacggtgaaaattacttgttcgggggatcaactgcccaaatacttcgccgattggtttcatcaacgttccgatcagactattttacaagtgatttatgatgataacaaacgtccgtcaggaatcccagagcgtatcagcggatcgagcagcggaacaacagcaactttgaccatccgcgatgtccgtgccgaagacgagggggactactattgtttctctggatacgtggactcagacagcaagctgtatgtttttggctcaggaacacaactgaccgtactgggcaagggcgagctcaattcgaagcttgaaggtaagcctatccctaaccctctcctcggcctcgattctacgcgtaccggtcatcatcaccatcaccattgagcatgcgaattcggtctcaggaggaacgattggtaaacccggtgaacgcatgagaaagcccccggaagatcaccttccgggggcttttttattgcgcggaccaaaacgaaaaaagacgctcgaaagcgtctcttttctggaatttggtaccgaggcgtaatgctctgccagtgttacaaccaattaaccaattctgattagaaaaactcatcgagcatcaaatgaaactgcaatttattcatatcaggattatcaataccatatttttgaaaaagccgtttctgtaatgaaggagaaaactcaccgaggcagttccataggatggcaagatcctggtatcggtctgcgattccgactcgtccaacatcaatacaacctattaatttcccctcgtcaaaaataaggttatcaagtgagaaatcaccatgagtgacgactgaatccggtgagaatggcaaaagcttatgcatttctttccagacttgttcaacaggccagccattacgctcgtcatcaaaatcactcgcatcaaccaaaccgttattcattcgtgattgcgcctgagcgagacgaaatacgcgatcgctgttaaaaggacaattacaaacaggaatcgaatgcaaccggcgcaggaacactgccagcgcatcaacaatattttcacctgaatcaggatattcttctaatacctggaatgctgttttcccggggatcgcagtggtgagtaaccatgcatcatcaggagtacggataaaatgcttgatggtcggaagaggcataaattccgtcagccagtttagtctgaccatctcatctgtaacatcattggcaacgctacctttgccatgtttcagaaacaactctggcgcatcgggcttcccatacaatcgatagattgtcgcacctgattgcccgacattatcgcgagcccatttatacccatataaatcagcatccatgttggaatttaatcgcggcctcgagcaagacgtttcccgttgaatatggctcataacaccccttgtattactgtttatgtaagcagacagttttattgttcatgatgatatatttttatcttgtgcaatgtaacatcagagattttgagacacaacgtggctttgttgaataaatcgaacttttgctgagttgaaggatcagatcacgcatcttcccgacaacgcagaccgttccgtggcaaagcaaaagttcaaaatcaccaactggtccacctacaacaaagctctcatcaaccgtggctccctcactttctggctggatgatggggcgattcaggcctggtatgagtcagcaacaccttcttcacgaggcagacctcagcgc

SEQ ID NO: 989 - DNA, 5864 bp, Artificial Sequence
  Description of Artificial Sequence: Synthetic polynucleotide
  p15A-Kan-ptet-IntiminN-FLAG-J43scFv-V5-HIS
tagcggagtgtatactggcttactatgttggcactgatgagggtgtcagtgaagtgcttcatgtggcaggagaaaaaaggctgcaccggtgcgtcagcagaatatgtgatacaggatatattccgcttcctcgctcactgactcgctacgctcggtcgttcgactgcggcgagcggaaatggcttacgaacggggcggagatttcctggaagatgccaggaagatacttaacagggaagtgagagggccgcggcaaagccgtttttccataggctccgcccccctgacaagcatcacgaaatctgacgctcaaatcagtggtggcgaaacccgacaggactataaagataccaggcgtttcccctggcggctccctcgtgcgctctcctgttcctgcctttcggtttaccggtgtcattccgctgttatggccgcgtttgtctcattccacgcctgacactcagttccgggtaggcagttcgctccaagctggactgtatgcacgaaccccccgttcagtccgaccgctgcgccttatccggtaactatcgtcttgagtccaacccggaaagacatgcaaaagcaccactggcagcagccactggtaattgatttagaggagttagtcttgaagtcatgcgccggttaaggctaaactgaaaggacaagttttggtgactgcgctcctccaagccagttacctcggttcaaagagttggtagctcagagaaccttcgaaaaaccgccctgcaaggcggttttttcgttttcagagcaagagattacgcgcagaccaaaacgatctcaagaagatcatcttattaaggggtctgacgctcagtggaacggtgcaccctgcagggctagctgataaagcgttcgcgctgcattcggcagtttaagacccactttcacatttaagttgtttttctaatccgcatatgatcaattcaaggccgaataagaaggctggctctgcaccttggtgatcaaataattcgatagcttgtcgtaataatggcggcatactatcagtagtaggtgtttccctttcttctttagcgacttgatgctcttgatcttccaatacgcaacctaaagtaaaatgccccacagcgctgagtgcatataatgcattctctagtgaaaaaccttgttggcataaaaaggctaattgattttcgagagtttcatactgtttttctgtaggccgtgtacctaaatgtacttttgctccatcgcgatgacttagtaaagcacatctaaaacttttagcgttattacgtaaaaaatcttgccagctttccccttctaaagggcaaaagtgagtatggtgcctatctaacatctcaatggctaaggcgtcgagcaaagcccgcttattttttacatgccaatacaatgtaggctgctctacacctagcttctgggcgagtttacgggttgttaaaccttcgattccgacctcattaagcagctctaatgcgctgttaatcactttacttttatctaatctagacatcattaattcctaatttttgttgacactctatcattgatagagttattttaccactccctatcagtgatagagaaaagtgaaaggaggtaaattatgactagtattacgcatggctgttatacccgtacgcgtcataaacacaagttgaagaaaactctgatcatgttatccgctggacttggactttttttttacgtgaatcagaactctttcgctaatggggaaaattattttaaactgggatcagacagcaaattacttacgcatgactcataccagaatcgtctgttttatacgctgaaaactggtgaaaccgttgcagatttaagtaaaagtcaggacattaacctgtcaactatttggtcacttaataaacacttatattcgagcgaatcggaaatgatgaaagctgcaccggggcaacaaatcatcttgcccctgaagaaattgccctttgaatactccgctttgcccttgctgggctcggctcctctggtagccgccggaggcgttgccggtcacactaataagctgacaaaaatgtcacccgacgtgacgaagagcaacatgacggatgataaggctttaaattacgcagctcagcaagcggcctcgttgggaagtcagttacagagtcgttcgttaaatggtgattatgctaaggataccgcattgggtattgccggcaaccaagcgtcgagccaacttcaggcatggttgcaacattacggcactgctgaagtaaatctgcaatcaggtaataattttgacggtagttccctggatttccttttacctttttacgattcagaaaagatgttggctttcggacaggtgggggcgcgttacatcgattcacgttttaccgctaacttgggggccggtcaacgcttcttcttacctgccaatatgttgggctataatgtatttatcgaccaggacttcagtggtgacaatacacgtctgggaattggtggagagtattggcgcgattactttaagtcatctgtaaatggctattttcgcatgagcggttggcatgaaagttacaacaagaaagactacgatgagcgccccgcgaacgggtttgacatccgttttaatggttatttgccatcttatcccgccttgggagctaaattaatctacgagcaatactatggagataacgtagctttgtttaatagcgacaagttacagtctaatccaggagcggctacagtgggagttaattataccccaatcccactggtcacaatgggaatcgattatcgccacgggactggtaatgaaaacgatttattatactccatgcagtttcgttatcagttcgataagagttggtcgcagcagattgagcctcaatatgttaacgaattacgtaccttgtccggcagtcgctacgatctggtacaacgcaataacaatatcatccttgagtataagaaacaggacattctgtctttgaacattccacatgatattaatggtaccgagcactcaacacaaaaaattcagctgattgtgaaatcaaagtatggactggaccgtatcgtgtgggatgatagcgctctgcgcagtcagggtggacagatccagcactcgggtagccagtctgcccaagactaccaggctatcctgccagcgtatgtccaagggggaagtaacatctacaaagttacagctcgcgcctattaccgcaacggtaattctagtaataatgtgcagttgacaattacggtgctgtccaatgggcaggtcgtcgatcaggtaggtgtgacggattttacagccgataaaacctctgcgaaggcagataacgcggataccatcacatacactgccactgtaaaaaaaaacggtgtcgcgcaggcaaacgttcctgttagcttcaacatcgtgtcgggtacagccacccttggggccaactcggcaaagactgacgcgaatggcaaggctacagtcacgttgaaatcctcgacaccaggacaggtcgttgtgtctgccaagacagcagagatgacctccgcccttaatgcatctgctgttatcttcttcgatcaaacgaaggcatctgtcgactataaggatgacgacgacaagcaattggaagttcgcctgttggagagcggtggtggacttgtgaaacccgagggaagccttaaactttcgtgcgttgctagtgggttcacattttcagactatttcatgtcctgggtccgtcaagccccgggaaaaggacttgaatgggttgcccatatttacaccaagagctataactatgccacatactattctggaagcgttaaaggtcgttttaccatttcgcgtgacgacagccgttctatggtgtatttgcagatgaataaccttcgtacagaagatacggctacttactactgtactcgcgatggatcaggctatcccagtttagatttctggggacagggtactcaggttactgtttcaagcggtggaggcggctctggcggtggtgggagtggaggcggtggcagttacgagctgacgcagccaccctcggcaagtgtaaacgtgggcgaaacggtgaaaattacttgttcgggggatcaactgcccaaatacttcgccgattggtttcatcaacgttccgatcagactattttacaagtgatttatgatgataacaaacgtccgtcaggaatcccagagcgtatcagcggatcgagcagcggaacaacagcaactttgaccatccgcgatgtccgtgccgaagacgagggggactactattgtttctctggatacgtggactcagacagcaagctgtatgtttttggctcaggaacacaactgaccgtactgggcaagggcgagctcaattcgaagcttgaaggtaagcctatccctaaccctctcctcggcctcgattctacgcgtaccggtcatcatcaccatcaccattgagcatgctaatcagccgtggaattcgcaacgtaaaaaaacccgccccggcgggtttttttataccggtctcaggaggaacgattggtaaacccggtgaacgcatgagaaagcccccggaagatcaccttccgggggcttttttattgcgcggaccaaaacgaaaaaagacgctcgaaagcgtctcttttctggaatttggtaccgaggcgtaatgctctgccagtgttacaaccaattaaccaattctgattagaaaaactcatcgagcatcaaatgaaactgcaatttattcatatcaggattatcaataccatatttttgaaaaagccgtttctgtaatgaaggagaaaactcaccgaggcagttccataggatggcaagatcctggtatcggtctgcgattccgactcgtccaacatcaatacaacctattaatttcccctcgtcaaaaataaggttatcaagtgagaaatcaccatgagtgacgactgaatccggtgagaatggcaaaagcttatgcatttctttccagacttgttcaacaggccagccattacgctcgtcatcaaaatcactcgcatcaaccaaaccgttattcattcgtgattgcgcctgagcgagacgaaatacgcgatcgctgttaaaaggacaattacaaacaggaatcgaatgcaaccggcgcaggaacactgccagcgcatcaacaatattttcacctgaatcaggatattcttctaatacctggaatgctgttttcccggggatcgcagtggtgagtaaccatgcatcatcaggagtacggataaaatgcttgatggtcggaagaggcataaattccgtcagccagtttagtctgaccatctcatctgtaacatcattggcaacgctacctttgccatgtttcagaaacaactctggcgcatcgggcttcccatacaatcgatagattgtcgcacctgattgcccgacattatcgcgagcccatttatacccatataaatcagcatccatgttggaatttaatcgcggcctcgagcaagacgtttcccgttgaatatggctcataacaccccttgtattactgtttatgtaagcagacagttttattgttcatgatgatatatttttatcttgtgcaatgtaacatcagagattttgagacacaacgtggctttgttgaataaatcgaacttttgctgagttgaaggatcagatcacgcatcttcccgacaacgcagaccgttccgtggcaaagcaaaagttcaaaatcaccaactggtccacctacaacaaagctctcatcaaccgtggctccctcactttctggctggatgatggggcgattcaggcctggtatgagtcagcaacaccttcttcacgaggcagacctcagcgc

SEQ ID NO: 990 - protein, 607 aa, Artificial Sequence
  Description of Artificial Sequence: Synthetic polypeptide
  Invasin display tag
MVFQPISEFLLIRNAGMSMYFNKIISFNIISRIVICIFLICGMFMAGASEKYDANAPQQVQPYSVSSSAFENLHPNNEMESSINPFSASDTERNAAIIDRANKEQETEAVNKMISTGARLAASGRASDVAHSMVGDAVNQEIKQWLNRFGTAQVNLNFDKNFSLKESSLDWLAPWYDSASFLFFSQLGIRNKDSRNTLNLGVGIRTLENGWLYGLNTFYDNDLTGHNHRIGLGAEAWTDYLQLAANGYFRLNGWHSSRDFSDYKERPATGGDLRANAYLPALPQLGGKLMYEQYTGERVALFGKDNLQRNPYAVTAGINYTPVPLLTVGVDQRMGKSSKHETQWNLQMNYRLGESFQSQLSPSAVAGTRLLAESRYNLVDRNNNIVLEYQKQQVVKLTLSPATISGLPGQVYQVNAQVQGASAVREIVWSDAELIAAGGTLTPLSTTQFNLVLPPYKRTAQVSRVTDDLTANFYSLSALAVDHQGNRSNSFTLSVTVQQPQLTLTAAVIGDGAPANGKTAITVEFTVADFEGKPLAGQEVVITTNNGALPNKITEKTDANGVARIALTNTTDGVTVVTAEVEGQRQSVDTHFVKGTIAADKSTLAAV

SEQ ID NO: 991 - protein, 148 aa, Artificial Sequence
  Description of Artificial Sequence: Synthetic polypeptide
  LppOmpA display tag
KATKLVLGAVILGSTLLAGCSSNAKIDQGINPYVGFEMGYDWLGRMPYKGSVENGAYKAQGVQLTAKLGYPITDDLDIYTRLGGMVWRADTKSNVYGKNHDTGVSPVFAGGVEYAITPEIATRLEYQWTNNIGDAHTIGTRPDNGIPG

SEQ ID NO: 992 - protein, 658 aa, Artificial Sequence
  Description of Artificial Sequence: Synthetic polypeptide
  IntiminN display tag
ITHGCYTRTRHKHKLKKTLIMLSAGLGLFFYVNQNSFANGENYFKLGSDSKLLTHDSYQNRLFYTLKTGETVADLSKSQDINLSTIWSLNKHLYSSESEMMKAAPGQQIILPLKKLPFEYSALPLLGSAPLVAAGGVAGHTNKLTKMSPDVTKSNMTDDKALNYAAQQAASLGSQLQSRSLNGDYAKDTALGIAGNQASSQLQAWLQHYGTAEVNLQSGNNFDGSSLDFLLPFYDSEKMLAFGQVGARYIDSRFTANLGAGQRFFLPANMLGYNVFIDQDFSGDNTRLGIGGEYWRDYFKSSVNGYFRMSGWHESYNKKDYDERPANGFDIRFNGYLPSYPALGAKLIYEQYYGDNVALFNSDKLQSNPGAATVGVNYTPIPLVTMGIDYRHGTGNENDLLYSMQFRYQFDKSWSQQIEPQYVNELRTLSGSRYDLVQRNNNIILEYKKQDILSLNIPHDINGTEHSTQKIQLIVKSKYGLDRIVWDDSALRSQGGQIQHSGSQSAQDYQAILPAYVQGGSNIYKVTARAYYRNGNSSNNVQLTITVLSNGQVVDQVGVTDFTADKTSAKADNADTITYTATVKKNGVAQANVPVSFNIVSGTATLGANSAKTDANGKATVTLKSSTPGQVVVSAKTAEMTSALNASAVIFFDQTKAS

SEQ ID NO: 993 - DNA, 5121 bp, Artificial Sequence
  Description of Artificial Sequence: Synthetic polynucleotide
  pUC-ptet-B6H12antihCD47scFv-V5-HIS
agcgcccaatacgcaaaccgcctctccccgcgcgttggccgattcattaatgcagctggcacgacaggtttcccgactggaaagcgggcagtgagcgcaacgcaattaatgtgagttagctcactcattaggcaccccaggctttacactttatgcttccggctcgtatgttgtgtggaattgtgagcggataacaatttcacacaggaaacagctatgaccatgattacgccaagctatttaggtgacactatagaatactcaagctatgcatcaagcttggtaccgagctcggatccactagtaacggccgccagtgtgctggaattcgcccttttaagacccactttcacatttaagttgtttttctaatccgcagatgatcaattcaaggccgaataagaaggctggctctgcaccttggtgatcaaataattcgatagcttgtcgtaataatggcggcatactatcagtagtaggtgtttccctttcttctttagcgacttgatgctcttgatcttccaatacgcaacctaaagtaaaatgccccacagcgctgagtgcatataatgcattctctagtgaaaaaccttgttggcataaaaaggctaattgattttcgagagtttcatactgtttttctgtaggccgtgtacctaaatgtacttttgctccatcgcgatgacttagtaaagcacatctaaaacttttagcgttattacgtaaaaaatcttgccagctttccccttctaaagggcaaaagtgagtatggtgcctatctaacatctcaatggctaaggcgtcgagcaaagcccgcttattttttacatgccaatacaatgtaggctgctctacacctagcttctgggcgagtttacgggttgttaaaccttcgattccgacctcattaagcagctctaatgcgctgttaatcactttacttttatctaatctagacatcattaattcctaatttttgttgacactctatcattgatagagttattttaccactccctatcagtgatagagaaaagtgaaaggaggtaaattcatatgactagtcaattgggtggtagcgaggtccagctggtggaatctggcggagacttagtaaagccgggaggttcgttgaagttgagttgcgctgctagtgggtttacgtttagcggctatggtatgtcatgggtccgccaaacacccgataaacgtttagagtgggtcgccacgattacgagtggaggcacctacacctattatccggattctgtcaaaggccgctttactatttctcgtgataatgcaaagaacaccttatatttacagatcgactccttgaagtctgaggataccgcaatttatttctgtgcccgttcgttagccggtaatgctatggattattgggggcaaggcacatctgtcacagtctcatccggaggaggcggatcaggtggtggcggttctggcggcggcggatctgacattgtgatgacacaatcacctgcgacactttcggttactccaggagaccgcgttagcttgtcgtgtcgcgcctctcaaaccatcagtgactacttacattggtaccaacagaaatcccatgaatcgccacgcttacttattaagtttgcgtcccaatcaattagtggtattccgtcgcgctttagtggtagcggttctggttctgatttcacattgtcaatcaacagcgtggagccggaggatgttggtgtttactactgccaaaacggtcacggctttccacgtacattcggagggggaacgaagttggaaattaaaggcagcggcgagctcggtggcagtggtaagcctatccctaaccctctcctcggcctcgattctacgggatccggtcatcatcaccatcaccattgagcatgctaatcagccgtggaattcgaattcggtctcaggaggaagggcgaattctgcagatatccatcacactggcggccgctcgagcatgcatctagagggcccaattcgccctatagtgagtcgtattacaattcactggccgtcgttttacaacgtcgtgactgggaaaaccctggcgttacccaacttaatcgccttgcagcacatccccctttcgccagctggcgtaatagcgaagaggcccgcaccgatcgcccttcccaacagttgcgcagcctatacgtacggcagtttaaggtttacacctataaaagagagagccgttatcgtctgtttgtggatgtacagagtgatattattgacacgccggggcgacggatggtgatccccctggccagtgcacgtctgctgtcagataaagtctcccgtgaactttacccggtggtgcatatcggggatgaaagctggcgcatgatgaccaccgatatggccagtgtgccggtctccgttatcggggaagaagtggctgatctcagccaccgcgaaaatgacatcaaaaacgccattaacctgatgttctggggaatataaatgtcaggcatgagattatcaaaaaggatcttcacctagatccttttcacgtagaaagccagtccgcagaaacggtgctgaccccggatgaatgtcagctactgggctatctggacaagggaaaacgcaagcgcaaagagaaagcaggtagcttgcagtgggcttacatggcgatagctagactgggcggttttatggacagcaagcgaaccggaattgccagctggggcgccctctggtaaggttgggaagccctgcaaagtaaactggatggctttctcgccgccaaggatctgatggcgcaggggatcaagctctgatcaagagacaggatgaggatcgtttcgcatgattgaacaagatggattgcacgcaggttctccggccgcttgggtggagaggctattcggctatgactgggcacaacagacaatcggctgctctgatgccgccgtgttccggctgtcagcgcaggggcgcccggttctttttgtcaagaccgacctgtccggtgccctgaatgaactgcaagacgaggcagcgcggctatcgtggctggccacgacgggcgttccttgcgcagctgtgctcgacgttgtcactgaagcgggaagggactggctgctattgggcgaagtgccggggcaggatctcctgtcatctcaccttgctcctgccgagaaagtatccatcatggctgatgcaatgcggcggctgcatacgcttgatccggctacctgcccattcgaccaccaagcgaaacatcgcatcgagcgagcacgtactcggatggaagccggtcttgtcgatcaggatgatctggacgaagagcatcaggggctcgcgccagccgaactgttcgccaggctcaaggcgagcatgcccgacggcgaggatctcgtcgtgacccatggcgatgcctgcttgccgaatatcatggtggaaaatggccgcttttctggattcatcgactgtggccggctgggtgtggcggaccgctatcaggacatagcgttggctacccgtgatattgctgaagagcttggcggcgaatgggctgaccgcttcctcgtgctttacggtatcgccgctcccgattcgcagcgcatcgccttctatcgccttcttgacgagttcttctgaattattaacgcttacaatttcctgatgcggtattttctccttacgcatctgtgcggtatttcacaccgcatacaggtggcacttttcggggaaatgtgcgcggaacccctatttgtttatttttctaaatacattcaaatatgtatccgctcatgagacaataaccctgataaatgcttcaataatagcacgtgaggagggccaccatggccaagttgaccagtgccgttccggtgctcaccgcgcgcgacgtcgccggagcggtcgagttctggaccgaccggctcgggttctcccgggacttcgtggaggacgacttcgccggtgtggtccgggacgacgtgaccctgttcatcagcgcggtccaggaccaggtggtgccggacaacaccctggcctgggtgtgggtgcgcggcctggacgagctgtacgccgagtggtcggaggtcgtgtccacgaacttccgggacgcctccgggccggccatgaccgagatcggcgagcagccgtgggggcgggagttcgccctgcgcgacccggccggcaactgcgtgcacttcgtggccgaggagcaggactgacacgtgctaaaacttcatttttaatttaaaaggatctaggtgaagatcctttttgataatctcatgaccaaaatcccttaacgtgagttttcgttccactgagcgtcagaccccgtagaaaagatcaaaggatcttcttgagatcctttttttctgcgcgtaatctgctgcttgcaaacaaaaaaaccaccgctaccagcggtggtttgtttgccggatcaagagctaccaactctttttccgaaggtaactggcttcagcagagcgcagataccaaatactgtccttctagtgtagccgtagttaggccaccacttcaagaactctgtagcaccgcctacatacctcgctctgctaatcctgttaccagtggctgctgccagtggcgataagtcgtgtcttaccgggttggactcaagacgatagttaccggataaggcgcagcggtcgggctgaacggggggttcgtgcacacagcccagcttggagcgaacgacctacaccgaactgagatacctacagcgtgagctatgagaaagcgccacgcttcccgaagggagaaaggcggacaggtatccggtaagcggcagggtcggaacaggagagcgcacgagggagcttccagggggaaacgcctggtatctttatagtcctgtcgggtttcgccacctctgacttgagcgtcgatttttgtgatgctcgtcaggggggcggagcctatggaaaaacgccagcaacgcggcctttttacggttcctgggcttttgctggccttttgctcacatgttctttcctgcgttatcccctgattctgtggataaccgtattaccgcctttgagtgagctgataccgctcgccgcagccgaacgaccgagcgcagcgagtcagtgagcgaggaagcggaag

SEQ ID NO: 994 - protein, 240 aa, Artificial Sequence
  Description of Artificial Sequence: Synthetic polypeptide
  B6H12-anti-CD47-scFv polypeptide sequence
EVQLVESGGDLVKPGGSLKLSCAASGFTFSGYGMSWVRQTPDKRLEWVATITSGGTYTYYPDSVKGRFTISRDNAKNTLYLQIDSLKSEDTAIYFCARSLAGNAMDYWGQGTSVTVSSGGGGSGGGGSGGGGSDIVMTQSPATLSVTPGDRVSLSCRASQTISDYLHWYQQKSHESPRLLIKFASQSISGIPSRFSGSGSGSDFTLSINSVEPEDVGVYYCQNGHGFPRTFGGGTKLEIK

SEQ ID NO: 995 - DNA, 5133 bp, Artificial Sequence
  Description of Artificial Sequence: Synthetic polynucleotide
  pUC-ptet-5F9antihCD47scFv-V5-HIS
agcgcccaatacgcaaaccgcctctccccgcgcgttggccgattcattaatgcagctggcacgacaggtttcccgactggaaagcgggcagtgagcgcaacgcaattaatgtgagttagctcactcattaggcaccccaggctttacactttatgcttccggctcgtatgttgtgtggaattgtgagcggataacaatttcacacaggaaacagctatgaccatgattacgccaagctatttaggtgacactatagaatactcaagctatgcatcaagcttggtaccgagctcggatccactagtaacggccgccagtgtgctggaattcgcccttttaagacccactttcacatttaagttgtttttctaatccgcagatgatcaattcaaggccgaataagaaggctggctctgcaccttggtgatcaaataattcgatagcttgtcgtaataatggcggcatactatcagtagtaggtgtttccctttcttctttagcgacttgatgctcttgatcttccaatacgcaacctaaagtaaaatgccccacagcgctgagtgcatataatgcattctctagtgaaaaaccttgttggcataaaaaggctaattgattttcgagagtttcatactgtttttctgtaggccgtgtacctaaatgtacttttgctccatcgcgatgacttagtaaagcacatctaaaacttttagcgttattacgtaaaaaatcttgccagctttccccttctaaagggcaaaagtgagtatggtgcctatctaacatctcaatggctaaggcgtcgagcaaagcccgcttattttttacatgccaatacaatgtaggctgctctacacctagcttctgggcgagtttacgggttgttaaaccttcgattccgacctcattaagcagctctaatgcgctgttaatcactttacttttatctaatctagacatcattaattcctaatttttgttgacactctatcattgatagagttattttaccactccctatcagtgatagagaaaagtgaaaggaggtaaattcatatgactagtcaattgggtggtagccaggtgcagcttgtgcagagtggcgctgaagtgaagaaaccgggcgcatcagtgaaagtgagctgcaaagcaagcggttataccttcacgaactataacatgcactgggtacgtcaagcacccggccagcgtcttgagtggatgggcaccatttatcctggaaacgacgacacatcctacaaccaaaagtttaaggaccgcgtaactatcactgctgacacttcagcttccacagcatatatggagcttagtagcctgcgtagtgaagacacagcggtctactactgcgcacgtggagggtatcgtgcgatggactactgggggcagggcacacttgtgactgtttcatctggcggtggaggctctggaggggggggtagcggggggggcggtagcgatatcgtaatgactcagtccccactttccttacccgtcacaccgggcgaacctgcatctattagctgtcgttcgtcgcaaagcattgtttactcgaatgggaatacgtacttggggtggtatcttcaaaaaccagggcagtcccctcagttgttgatctacaaggtgtccaaccgctttagtggggtgcctgatcgtttctctggcagtggtagtggtaccgacttcacgcttaaaatttcccgtgtcgaagcagaagacgttggcgtatattactgcttccaaggcagtcatgtgccatacacgttcgggcaaggcaccaaacttgagatcaaaggcagcggcgagctcggtggcagtggtaagcctatccctaaccctctcctcggcctcgattctacgggatccggtcatcatcaccatcaccattgagcatgctaatcagccgtggaattcgaattcggtctcaggaggaagggcgaattctgcagatatccatcacactggcggccgctcgagcatgcatctagagggcccaattcgccctatagtgagtcgtattacaattcactggccgtcgttttacaacgtcgtgactgggaaaaccctggcgttacccaacttaatcgccttgcagcacatccccctttcgccagctggcgtaatagcgaagaggcccgcaccgatcgcccttcccaacagttgcgcagcctatacgtacggcagtttaaggtttacacctataaaagagagagccgttatcgtctgtttgtggatgtacagagtgatattattgacacgccggggcgacggatggtgatccccctggccagtgcacgtctgctgtcagataaagtctcccgtgaactttacccggtggtgcatatcggggatgaaagctggcgcatgatgaccaccgatatggccagtgtgccggtctccgttatcggggaagaagtggctgatctcagccaccgcgaaaatgacatcaaaaacgccattaacctgatgttctggggaatataaatgtcaggcatgagattatcaaaaaggatcttcacctagatccttttcacgtagaaagccagtccgcagaaacggtgctgaccccggatgaatgtcagctactgggctatctggacaagggaaaacgcaagcgcaaagagaaagcaggtagcttgcagtgggcttacatggcgatagctagactgggcggttttatggacagcaagcgaaccggaattgccagctggggcgccctctggtaaggttgggaagccctgcaaagtaaactggatggctttctcgccgccaaggatctgatggcgcaggggatcaagctctgatcaagagacaggatgaggatcgtttcgcatgattgaacaagatggattgcacgcaggttctccggccgcttgggtggagaggctattcggctatgactgggcacaacagacaatcggctgctctgatgccgccgtgttccggctgtcagcgcaggggcgcccggttctttttgtcaagaccgacctgtccggtgccctgaatgaactgcaagacgaggcagcgcggctatcgtggctggccacgacgggcgttccttgcgcagctgtgctcgacgttgtcactgaagcgggaagggactggctgctattgggcgaagtgccggggcaggatctcctgtcatctcaccttgctcctgccgagaaagtatccatcatggctgatgcaatgcggcggctgcatacgcttgatccggctacctgcccattcgaccaccaagcgaaacatcgcatcgagcgagcacgtactcggatggaagccggtcttgtcgatcaggatgatctggacgaagagcatcaggggctcgcgccagccgaactgttcgccaggctcaaggcgagcatgcccgacggcgaggatctcgtcgtgacccatggcgatgcctgcttgccgaatatcatggtggaaaatggccgcttttctggattcatcgactgtggccggctgggtgtggcggaccgctatcaggacatagcgttggctacccgtgatattgctgaagagcttggcggcgaatgggctgaccgcttcctcgtgctttacggtatcgccgctcccgattcgcagcgcatcgccttctatcgccttcttgacgagttcttctgaattattaacgcttacaatttcctgatgcggtattttctccttacgcatctgtgcggtatttcacaccgcatacaggtggcacttttcggggaaatgtgcgcggaacccctatttgtttatttttctaaatacattcaaatatgtatccgctcatgagacaataaccctgataaatgcttcaataatagcacgtgaggagggccaccatggccaagttgaccagtgccgttccggtgctcaccgcgcgcgacgtcgccggagcggtcgagttctggaccgaccggctcgggttctcccgggacttcgtggaggacgacttcgccggtgtggtccgggacgacgtgaccctgttcatcagcgcggtccaggaccaggtggtgccggacaacaccctggcctgggtgtgggtgcgcggcctggacgagctgtacgccgagtggtcggaggtcgtgtccacgaacttccgggacgcctccgggccggccatgaccgagatcggcgagcagccgtgggggcgggagttcgccctgcgcgacccggccggcaactgcgtgcacttcgtggccgaggagcaggactgacacgtgctaaaacttcatttttaatttaaaaggatctaggtgaagatcctttttgataatctcatgaccaaaatcccttaacgtgagttttcgttccactgagcgtcagaccccgtagaaaagatcaaaggatcttcttgagatcctttttttctgcgcgtaatctgctgcttgcaaacaaaaaaaccaccgctaccagcggtggtttgtttgccggatcaagagctaccaactctttttccgaaggtaactggcttcagcagagcgcagataccaaatactgtccttctagtgtagccgtagttaggccaccacttcaagaactctgtagcaccgcctacatacctcgctctgctaatcctgttaccagtggctgctgccagtggcgataagtcgtgtcttaccgggttggactcaagacgatagttaccggataaggcgcagcggtcgggctgaacggggggttcgtgcacacagcccagcttggagcgaacgacctacaccgaactgagatacctacagcgtgagctatgagaaagcgccacgcttcccgaagggagaaaggcggacaggtatccggtaagcggcagggtcggaacaggagagcgcacgagggagcttccagggggaaacgcctggtatctttatagtcctgtcgggtttcgccacctctgacttgagcgtcgatttttgtgatgctcgtcaggggggcggagcctatggaaaaacgccagcaacgcggcctttttacggttcctgggcttttgctggccttttgctcacatgttctttcctgcgttatcccctgattctgtggataaccgtattaccgcctttgagtgagctgataccgctcgccgcagccgaacgaccgagcgcagcgagtcagtgagcgaggaagcggaag

SEQ ID NO: 996 - protein, 244 aa, Artificial Sequence
  Description of Artificial Sequence: Synthetic polypeptide
  5F9-anti-CD47-scFv polypeptide sequence
QVQLVQSGAEVKKPGASVKVSCKASGYTFTNYNMHWVRQAPGQRLEWMGTIYPGNDDTSYNQKFKDRVTITADTSASTAYMELSSLRSEDTAVYYCARGGYRAMDYWGQGTLVTVSSGGGGSGGGGSGGGGSDIVMTQSPLSLPVTPGEPASISCRSSQSIVYSNGNTYLGWYLQKPGQSPQLLIYKVSNRFSGVPDRFSGSGSGTDFTLKISRVEAEDVGVYYCFQGSHVPYTFGQGTKLEIK

SEQ ID NO: 997 - DNA, 2555 bp, Artificial Sequence
  Description of Artificial Sequence: Synthetic polynucleotide
  Biosafety Plasmid System Component  dap A
actcttcctttttcaatattattgaagcatttatcagggttattgtctcatgagcggatacatatttgaatgtatttagaaaaataaacaaataggggaattaaaaaaaagcccgctcattaggcgggctactacctaggccgcggccgcgcgaattcgagctcggtacccggggatcctctagagtcgacctgcaggcatgcaagcttgcggccgcgtcgtgactgggaaaaccctggcgactagtcttggactcctgttgatagatccagtaatgacctcagaactccatctggatttgttcagaacgctcggttgccgccgggcgttttttattggtgagaatccaggggtccccaataattacgatttaaatcacagcaaacaccacgtcggccctatcagctgcgtgctttctatgagtcgttgctgcataacttgacaattaacatccggctcgtagggtttgtggagggcccaagttcacttaaaaaggagatcaacaatgaaagcaattttcgtactgaaacatcttaatcatgctggggagggtttctaatgttcacgggaagtattgtcgcgattgttactccgatggatgaaaaaggtaatgtctgtcgggctagcttgaaaaaactgattgattatcatgtcgccagcggtacttcggcgatcgtttctgttggcaccactggcgagtccgctaccttaaatcatgacgaacatgctgatgtggtgatgatgacgctggatctggctgatgggcgcattccggtaattgccgggaccggcgctaacgctactgcggaagccattagcctgacgcagcgcttcaatgacagtggtatcgtcggctgcctgacggtaaccccttactacaatcgtccgtcgcaagaaggtttgtatcagcatttcaaagccatcgctgagcatactgacctgccgcaaattctgtataatgtgccgtcccgtactggctgcgatctgctcccggaaacggtgggccgtctggcgaaagtaaaaaatattatcggaatcaaagaggcaacagggaacttaacgcgtgtaaaccagatcaaagagctggtttcagatgattttgttctgctgagcggcgatgatgcgagcgcgctggacttcatgcaattgggcggtcatggggttatttccgttacggctaacgtcgcagcgcgtgatatggcccagatgtgcaaactggcagcagaagggcattttgccgaggcacgcgttattaatcagcgtctgatgccattacacaacaaactatttgtcgaacccaatccaatcccggtgaaatgggcatgtaaggaactgggtcttgtggcgaccgatacgctgcgcctgccaatgacaccaatcaccgacagtggccgtgagacggtcagagcggcgcttaaacatgccggtttgctgtaagacttttgtcaggttcctactgtgacgactaccaccgatagactggagtgttgctgcgaaaaaaccccgccgaagcggggttttttgcgagaagtcaccacgattgtgctttacacggagtagtcggcagttccttaagtcagaatagtggacaggcggccaagaacttcgttcatgatagtctccggaacccgttcgagtcgttttccgccccgtgctttcatatcaattgtccggggttgatcgcaacgtacaacacctgtggtacgtatgccaacaccatccaacgacaccgcaaagccggcagtgcgggcaaaattgcctccgctggttacgggcacaacaacaggcaggcgggtcacgcgattaaaggccgccggtgtgacaatcagcaccggccgcgttccctgctgctcatgacctgcggtaggatcaagcgagacaagccagatttcccctctttccatctagtataactattgtttctctagtaacatttattgtacaacacgagcccatttttgtcaaataaattttaaattatatcaacgttaataagacgttgtcaataaaattattttgacaaaattggccggccggcgcgccgatctgaagatcagcagttcaacctgttgatagtacgtactaagctctcatgtttcacgtactaagctctcatgtttaacgtactaagctctcatgtttaacgaactaaaccctcatggctaacgtactaagctctcatggctaacgtactaagctctcatgtttcacgtactaagctctcatgtttgaacaataaaattaatataaatcagcaacttaaatagcctctaaggttttaagttttataagaaaaaaaagaatatataaggcttttaaagcctttaaggtttaacggttgtggacaacaagccagggatgtaacgcactgagaagcccttagagcctctcaaagcaattttgagtgacacaggaacacttaacggctgacatggggcgcgcccagctgtctagggcggcggatttgtcctactcaggagagcgttcaccgacaaacaacagataaaacgaaaggcccagtctttcgactgagcctttcgttttatttgatgcct

SEQ ID NO: 998 - DNA, 2472 bp, Artificial Sequence
  Description of Artificial Sequence: Synthetic polynucleotide
  Biosafety Plasmid System Component  ThyA
actcttcctttttcaatattattgaagcatttatcagggttattgtctcatgagcggatacatatttgaatgtatttagaaaaataaacaaataggggaattaaaaaaaagcccgctcattaggcgggctactacctaggccgcggccgcgcgaattcgagctcggtacccggggatcctctagagtcgacctgcaggcatgcaagcttgcggccgcgtcgtgactgggaaaaccctggcgactagtcttggactcctgttgatagatccagtaatgacctcagaactccatctggatttgttcagaacgctcggttgccgccgggcgttttttattggtgagaatccaggggtccccaataattacgatttaaatcacagcaaacaccacgtcggccctatcagctgcgtgctttctatgagtcgttgctgcataacttgacaattaatcatccggctcgtagggtttgtggagggcccaagttcacttaaaaaggagatcaacaatgaaagcaattttcgtactgaaacatcttaatcatgctggggagggtttctaatgaaacagtatttagaactgatgcaaaaagtgctcgacgaaggcacacagaaaaacgaccgtaccggaaccggaacgctttccatttttggtcatcagatgcgttttaacctgcaagatggattcccgctggtgacaactaaacgttgccacctgcgttccatcatccatgaactgctgtggtttcttcagggcgacactaacattgcttatctacacgaaaacaatgtcaccatctgggacgaatgggccgatgaaaacggcgacctcgggccagtgtatggtaaacagtggcgtgcctggccaacgccagatggtcgtcatattgaccagatcactacggtactgaaccagctgaaaaacgacccggattcgcgccgcattattgtttcagcgtggaacgtaggcgaactggataaaatggcgctggcaccgtgccatgcattcttccagttctatgtggcagacggcaaactctcttgccagctttatcagcgctcctgtgacgtcttcctcggcctgccgttcaacattgccagctacgcgttattggtgcatatgatggcgcagcagtgcgatctggaagtgggtgattttgtctggaccggtggcgacacgcatctgtacagcaaccatatggatcaaactcatctgcaattaagccgcgaaccgcgtccgctgccgaagttgattatcaaacgtaaacccgaatccatcttcgactaccgtttcgaagactttgagattgaaggctacgatccgcatccgggcattaaagcgccggtggctatctaagacttttgtcaggttcctactgtgacgactaccaccgatagactggagtgttgctgcgaaaaaaccccgccgaagcggggttttttgcgagaagtcaccacgattgtgctttacacggagtagtcggcagttccttaagtcagaatagtggacaggcggccaagaacttcgttcatgatagtctccggaacccgttcgagtcgttttccgccccgtgctttcatatcaattgtccggggttgatcgcaacgtacaacacctgtggtacgtatgccaacaccatccaacgacaccgcaaagccggcagtgcgggcaaaattgcctccgctggttacgggcacaacaacaggcaggcgggtcacgcgattaaaggccgccggtgtgacaatcagcaccggccgcgttccctgctgctcatgacctgcggtaggatcaagcgagacaagccagatttcccctctttccatctagtataactattgtttctctagtaacatttattgtacaacacgagcccatttttgtcaaataaattttaaattatatcaacgttaataagacgttgtcaataaaattattttgacaaaattggccggccggcgcgccgatctgaagatcagcagttcaacctgttgatagtacgtactaagctctcatgtttcacgtactaagctctcatgtttaacgtactaagctctcatgtttaacgaactaaaccctcatggctaacgtactaagctctcatggctaacgtactaagctctcatgtttcacgtactaagctctcatgtttgaacaataaaattaatataaatcagcaacttaaatagcctctaaggttttaagttttataagaaaaaaaagaatatataaggcttttaaagcctttaaggtttaacggttgtggacaacaagccagggatgtaacgcactgagaagcccttagagcctctcaaagcaattttgagtgacacaggaacacttaacggctgacatggggcgcgcccagctgtctagggcggcggatttgtcctactcaggagagcgttcaccgacaaacaacagataaaacgaaaggcccagtctttcgactgagcctttcgttttatttgatgcct

SEQ ID NO: 999 - DNA, 333 bp, Artificial Sequence
  Description of Artificial Sequence: Synthetic polynucleotide
  Kid toxin (reverse orientation)
ttaagtcagaatagtggacaggcggccaagaacttcgttcatgatagtctccggaacccgttcgagtcgttttccgccccgtgctttcatatcaattgtccggggttgatcgcaacgtacaacacctgtggtacgtatgccaacaccatccaacgacaccgcaaagccggcagtgcgggcaaaattgcctccgctggttacgggcacaacaacaggcaggcgggtcacgcgattaaaggccgccggtgtgacaatcagcaccggccgcgttccctgctgctcatgacctgcggtaggatcaagcgagacaagccagatttcccctctttccat

SEQ ID NO: 1000 - DNA, 879 bp, Artificial Sequence
  Description of Artificial Sequence: Synthetic polynucleotide
  dapA
atgttcacgggaagtattgtcgcgattgttactccgatggatgaaaaaggtaatgtctgtcgggctagcttgaaaaaactgattgattatcatgtcgccagcggtacttcggcgatcgtttctgttggcaccactggcgagtccgctaccttaaatcatgacgaacatgctgatgtggtgatgatgacgctggatctggctgatgggcgcattccggtaattgccgggaccggcgctaacgctactgcggaagccattagcctgacgcagcgcttcaatgacagtggtatcgtcggctgcctgacggtaaccccttactacaatcgtccgtcgcaagaaggtttgtatcagcatttcaaagccatcgctgagcatactgacctgccgcaaattctgtataatgtgccgtcccgtactggctgcgatctgctcccggaaacggtgggccgtctggcgaaagtaaaaaatattatcggaatcaaagaggcaacagggaacttaacgcgtgtaaaccagatcaaagagctggtttcagatgattttgttctgctgagcggcgatgatgcgagcgcgctggacttcatgcaattgggcggtcatggggttatttccgttacggctaacgtcgcagcgcgtgatatggcccagatgtgcaaactggcagcagaagggcattttgccgaggcacgcgttattaatcagcgtctgatgccattacacaacaaactatttgtcgaacccaatccaatcccggtgaaatgggcatgtaaggaactgggtcttgtggcgaccgatacgctgcgcctgccaatgacaccaatcaccgacagtggccgtgagacggtcagagcggcgcttaaacatgccggtttgctgtaa

SEQ ID NO: 1001 - DNA, 795 bp, Artificial Sequence
  Description of Artificial Sequence: Synthetic polynucleotide
  thyA
atgaaacagtatttagaactgatgcaaaaagtgctcgacgaaggcacacagaaaaacgaccgtaccggaaccggaacgctttccatttttggtcatcagatgcgttttaacctgcaagatggattcccgctggtgacaactaaacgttgccacctgcgttccatcatccatgaactgctgtggtttcttcagggcgacactaacattgcttatctacacgaaaacaatgtcaccatctgggacgaatgggccgatgaaaacggcgacctcgggccagtgtatggtaaacagtggcgtgcctggccaacgccagatggtcgtcatattgaccagatcactacggtactgaaccagctgaaaaacgacccggattcgcgccgcattattgtttcagcgtggaacgtaggcgaactggataaaatggcgctggcaccgtgccatgcattcttccagttctatgtggcagacggcaaactctcttgccagctttatcagcgctcctgtgacgtcttcctcggcctgccgttcaacattgccagctacgcgttattggtgcatatgatggcgcagcagtgcgatctggaagtgggtgattttgtctggaccggtggcgacacgcatctgtacagcaaccatatggatcaaactcatctgcaattaagccgcgaaccgcgtccgctgccgaagttgattatcaaacgtaaacccgaatccatcttcgactaccgtttcgaagactttgagattgaaggctacgatccgcatccgggcattaaagcgccggtggctatctaa

SEQ ID NO: 1002 - protein, 110 aa, Artificial Sequence
  Description of Artificial Sequence: Synthetic polypeptide
  Kid toxin polypeptide
MERGEIWLVSLDPTAGHEQQGTRPVLIVTPAAFNRVTRLPVVVPVTSGGNFARTAGFAVSLDGVGIRTTGVVRCDQPRTIDMKARGGKRLERVPETIMNEVLGRLSTILT

SEQ ID NO: 1003 - protein, 292 aa, Artificial Sequence
  Description of Artificial Sequence: Synthetic polypeptide
  dapA polypeptide
MFTGSIVAIVTPMDEKGNVCRASLKKLIDYHVASGTSAIVSVGTTGESATLNHDEHADVVMMTLDLADGRIPVIAGTGANATAEAISLTQRFNDSGIVGCLTVTPYYNRPSQEGLYQHFKAIAEHTDLPQILYNVPSRTGCDLLPETVGRLAKVKNIIGIKEATGNLTRVNQIKELVSDDFVLLSGDDASALDFMQLGGHGVISVTANVAARDMAQMCKLAAEGHFAEARVINQRLMPLHNKLFVEPNPIPVKWACKELGLVATDTLRLPMTPITDSGRETVRAALKHAGLL

SEQ ID NO: 1004 - protein, 264 aa, Artificial Sequence
  Description of Artificial Sequence: Synthetic polypeptide
  ThyA polypeptide
MKQYLELMQKVLDEGTQKNDRTGTGTLSIFGHQMRFNLQDGFPLVTTKRCHLRSIIHELLWFLQGDTNIAYLHENNVTIWDEWADENGDLGPVYGKQWRAWPTPDGRHIDQITTVLNQLKNDPDSRRIIVSAWNVGELDKMALAPCHAFFQFYVADGKLSCQLYQRSCDVFLGLPFNIASYALLVHMMAQQCDLEVGDFVWTGGDTHLYSNHMDQTHLQLSREPRPLPKLIIKRKPESIFDYRFEDFEIEGYDPHPGIKAPVAI

SEQ ID NO: 1005 - DNA, 1490 bp, Artificial Sequence
  Description of Artificial Sequence: Synthetic polynucleotide
  Biosafety Chromosomal Construct -  low copy Rep (Pi) and Kis antitoxin (as shown in Fig. 76C)
ttgacggctagctcagtcctaggtacagtgctagcggatctgctggaacaggtggtgagactcaaggtcatgatggacgtgaacaaaaaaacgaaaattcgccaccgaaacgagctaaatcacaccctggctcaacttcctttgcccgcaaagcgagtgatgtatatggcgcttgctcccattgatagcaaagaacctcttgaacgagggcgagttttcaaaattagggctgaagaccttgcagcgctcgccaaaatcaccccatcgcttgcttatcgacaattaaaagagggtggtaaattacttggtgccagcaaaatttcgctaagaggggatgatatcattgctttagctaaagagcttaacctgctctttactgctaaaaactcccctgaagagttagaccttaacattattgagtggatagcttattcaaatgatgaaggatacttgtctttaaaattcaccagaaccatagaaccatatatctctagccttattgggaaaaaaaataaattcacaacgcaattgttaacggcaagcttacgcttaagtagccagtattcatcttctctttatcaacttatcaggaagcattactctaattttaagaagaaaaattattttattatttccgttgatgagttaaaggaagagttaatagcttatacttttgataaagatggaaatattgagtacaaataccctgactttcctatttttaaaagggatgtgttaaataaagccattgctgaaattaaaaagaaaacagaaatatcgtttgttggcttcactgttcatgaaaaagaaggaagaaaaattagtaagctgaagttcgaatttgtcgttgatgaagatgaattttctggcgataaagatgatgaagctttttttatgaatttatctgaagctgatgcagcttttctcaaggtatttgatgaaaccgtacctcccaaaaaagctaaggggtgaggatctccaggcatcaaataaaacgaaaggctcagtcgaaagactgggcctttcgttttatctgttgtttgtcggtgaacgctctctactagagtcacactggctcaccttcgggtgggcctttctgcgtttatacccgggaaaaagagtattgacttaaagtctaacctataggtataatgtgtggagaccagaggtaaggaggtaacaaccatgcgagtgttgaagaaacatcttaatcatgctaaggaggttttctaatgcataccacccgactgaagagggttggcggctcagttatgctgaccgtcccaccggcactgctgaatgcgctgtctctgggcacagataatgaagttggcatggtcattgataatggccggctgattgttgagccgtacagacgcccgcaatattcactggctgagctactggcacagtgtgatccgaatgctgaaatatcagctgaagaacgagaatggctggatgcaccggcgactggtcaggaggaaatctga

SEQ ID NO: 1006 - DNA, 1490 bp, Artificial Sequence
  Description of Artificial Sequence: Synthetic polynucleotide
  Biosafety Chromosomal Construct -  medium copy Rep (Pi) and Kis antitoxin (as shown in Fig. 76D)
ttgacggctagctcagtcctaggtacagtgctagcggatcttccggaagactaggtgagactcaaggtcatgatggacgtgaacaaaaaaacgaaaattcgccaccgaaacgagctaaatcacaccctggctcaacttcctttgcccgcaaagcgagtgatgtatatggcgcttgctcccattgatagcaaagaacctcttgaacgagggcgagttttcaaaattagggctgaagaccttgcagcgctcgccaaaatcaccccatcgcttgcttatcgacaattaaaagagggtggtaaattacttggtgccagcaaaatttcgctaagaggggatgatatcattgctttagctaaagagcttaacctgctctttactgctaaaaactcccctgaagagttagaccttaacattattgagtggatagcttattcaaatgatgaaggatacttgtctttaaaattcaccagaaccatagaaccatatatctctagccttattgggaaaaaaaataaattcacaacgcaattgttaacggcaagcttacgcttaagtagccagtattcatcttctctttatcaacttatcaggaagcattactctaattttaagaagaaaaattattttattatttccgttgatgagttaaaggaagagttaatagcttatacttttgataaagatggaaatattgagtacaaataccctgactttcctatttttaaaagggatgtgttaaataaagccattgctgaaattaaaaagaaaacagaaatatcgtttgttggcttcactgttcatgaaaaagaaggaagaaaaattagtaagctgaagttcgaatttgtcgttgatgaagatgaattttctggcgataaagatgatgaagctttttttatgaatttatctgaagctgatgcagcttttctcaaggtatttgatgaaaccgtacctcccaaaaaagctaaggggtgaggatctccaggcatcaaataaaacgaaaggctcagtcgaaagactgggcctttcgttttatctgttgtttgtcggtgaacgctctctactagagtcacactggctcaccttcgggtgggcctttctgcgtttatacccgggaaaaagagtattgacttaaagtctaacctataggtataatgtgtggagaccagaggtaaggaggtaacaaccatgcgagtgttgaagaaacatcttaatcatgctaaggaggttttctaatgcataccacccgactgaagagggttggcggctcagttatgctgaccgtcccaccggcactgctgaatgcgctgtctctgggcacagataatgaagttggcatggtcattgataatggccggctgattgttgagccgtacagacgcccgcaatattcactggctgagctactggcacagtgtgatccgaatgctgaaatatcagctgaagaacgagaatggctggatgcaccggcgactggtcaggaggaaatctga

SEQ ID NO: 1007 - DNA, 917 bp, Artificial Sequence
  Description of Artificial Sequence: Synthetic polynucleotide
  Rep (Pi)
tgagactcaaggtcatgatggacgtgaacaaaaaaacgaaaattcgccaccgaaacgagctaaatcacaccctggctcaacttcctttgcccgcaaagcgagtgatgtatatggcgcttgctcccattgatagcaaagaacctcttgaacgagggcgagttttcaaaattagggctgaagaccttgcagcgctcgccaaaatcaccccatcgcttgcttatcgacaattaaaagagggtggtaaattacttggtgccagcaaaatttcgctaagaggggatgatatcattgctttagctaaagagcttaacctgctctttactgctaaaaactcccctgaagagttagaccttaacattattgagtggatagcttattcaaatgatgaaggatacttgtctttaaaattcaccagaaccatagaaccatatatctctagccttattgggaaaaaaaataaattcacaacgcaattgttaacggcaagcttacgcttaagtagccagtattcatcttctctttatcaacttatcaggaagcattactctaattttaagaagaaaaattattttattatttccgttgatgagttaaaggaagagttaatagcttatacttttgataaagatggaaatattgagtacaaataccctgactttcctatttttaaaagggatgtgttaaataaagccattgctgaaattaaaaagaaaacagaaatatcgtttgttggcttcactgttcatgaaaaagaaggaagaaaaattagtaagctgaagttcgaatttgtcgttgatgaagatgaattttctggcgataaagatgatgaagctttttttatgaatttatctgaagctgatgcagcttttctcaaggtatttgatgaaaccgtacctcccaaaaaagctaaggggtga

SEQ ID NO: 1008 - DNA, 255 bp, Artificial Sequence
  Description of Artificial Sequence: Synthetic polynucleotide
  Kis antitoxin
cataccacccgactgaagagggttggcggctcagttatgctgaccgtcccaccggcactgctgaatgcgctgtctctgggcacagataatgaagttggcatggtcattgataatggccggctgattgttgagccgtacagacgcccgcaatattcactggctgagctactggcacagtgtgatccgaatgctgaaatatcagctgaagaacgagaatggctggatgcaccggcgactggtcaggaggaaatctga

SEQ ID NO: 1009 - DNA, 14 bp, Artificial Sequence
  Description of Artificial Sequence: Synthetic oligonucleotide
  RBS (low copy)
gctggaacaggtgg

SEQ ID NO: 1010 - DNA, 14 bp, Artificial Sequence
  Description of Artificial Sequence: Synthetic oligonucleotide
  RBS (medium copy)
tccggaagactagg

SEQ ID NO: 1011 - DNA, 60 bp, Artificial Sequence
  Description of Artificial Sequence: Synthetic oligonucleotide
  SR36
tagaactgatgcaaaaagtgctcgacgaaggcacacagatgtgtaggctggagctgcttc

SEQ ID NO: 1012 - DNA, 60 bp, Artificial Sequence
  Description of Artificial Sequence: Synthetic oligonucleotide
  SR38
gtttcgtaattagatagccaccggcgctttaatgcccggacatatgaatatcctccttag

SEQ ID NO: 1013 - DNA, 52 bp, Artificial Sequence
  Description of Artificial Sequence: Synthetic oligonucleotide
  SR33
caacacgtttcctgaggaaccatgaaacagtatttagaactgatgcaaaaag

SEQ ID NO: 1014 - DNA, 36 bp, Artificial Sequence
  Description of Artificial Sequence: Synthetic oligonucleotide
  SR43
atatcgtcgcagcccacagcaacacgtttcctgagg

SEQ ID NO: 1015 - DNA, 47 bp, Artificial Sequence
  Description of Artificial Sequence: Synthetic oligonucleotide
  SR44
aagaatttaacggagggcaaaaaaaaccgacgcacactggcgtcggc

SEQ ID NO: 1016 - DNA, 967 bp, Artificial Sequence
  Description of Artificial Sequence: Synthetic polynucleotide
  Wild-type clbA
caaatatcacataatcttaacatatcaataaacacagtaaagtttcatgtgaaaaacatcaaacataaaatacaagctcggaatacgaatcacgctatacacattgctaacaggaatgagattatctaaatgaggattgatatattaattggacatactagtttttttcatcaaaccagtagagataacttccttcactatctcaatgaggaagaaataaaacgctatgatcagtttcattttgtgagtgataaagaactctatattttaagccgtatcctgctcaaaacagcactaaaaagatatcaacctgatgtctcattacaatcatggcaatttagtacgtgcaaatatggcaaaccatttatagtttttcctcagttggcaaaaaagattttttttaacctttcccatactatagatacagtagccgttgctattagttctcactgcgagcttggtgtcgatattgaacaaataagagatttagacaactcttatctgaatatcagtcagcatttttttactccacaggaagctactaacatagtttcacttcctcgttatgaaggtcaattacttttttggaaaatgtggacgctcaaagaagcttacatcaaatatcgaggtaaaggcctatctttaggactggattgtattgaatttcatttaacaaataaaaaactaacttcaaaatatagaggttcacctgtttatttctctcaatggaaaatatgtaactcatttctcgcattagcctctccactcatcacccctaaaataactattgagctatttcctatgcagtcccaactttatcaccacgactatcagctaattcattcgtcaaatgggcagaattgaatcgccacggataatctagacacttctgagccgtcgataatattgattttcatattccgtcggtggtgtaagtatcccgcataatcgtgccattcacatttag

SEQ ID NO: 1017 - DNA, 424 bp, Artificial Sequence
  Description of Artificial Sequence: Synthetic polynucleotide
  clbA knockout
ggatggggggaaacatggataagttcaaagaaaaaaacccgttatctctgcgtgaaagacaagtattgcgcatgctggcacaaggtgatgagtactctcaaatatcacataatcttaacatatcaataaacacagtaaagtttcatgtgaaaaacatcaaacataaaatacaagctcggaatacgaatcacgctatacacattgctaacaggaatgagattatctaaatgaggattgatgtgtaggctggagctgcttcgaagttcctatactttctagagaataggaacttcggaataggaacttcggaataggaactaaggaggatattcatatgtcgtcaaatgggcagaattgaatcgccacggataatctagacacttctgagccgtcgataatattgattttcatattccgtcggtgg

SEQ ID NO: 1018 - DNA, 28 bp, Artificial Sequence
  Description of Artificial Sequence: Synthetic oligonucleotide
  Master Sequence
  modified_base (13)..(15): a, c, g or t
  modified_base (18)..(20): a, c, g or t
tctagagaaagannngannnactagatg

SEQ ID NO: 1019 - DNA, 28 bp, Artificial Sequence
  Description of Artificial Sequence: Synthetic oligonucleotide
  BBa_J61100
tctagagaaagaggggacaaactagatg

SEQ ID NO: 1020 - DNA, 28 bp, Artificial Sequence
  Description of Artificial Sequence: Synthetic oligonucleotide
  BBa_J61101
tctagagaaagacaggacccactagatg

SEQ ID NO: 1021 - DNA, 28 bp, Artificial Sequence
  Description of Artificial Sequence: Synthetic oligonucleotide
  BBa_J61102
tctagagaaagatccgatgtactagatg

SEQ ID NO: 1022 - DNA, 28 bp, Artificial Sequence
  Description of Artificial Sequence: Synthetic oligonucleotide
  BBa_J61103
tctagagaaagattagacaaactagatg

SEQ ID NO: 1023 - DNA, 28 bp, Artificial Sequence
  Description of Artificial Sequence: Synthetic oligonucleotide
  BBa_J61104
tctagagaaagaagggacagactagatg

SEQ ID NO: 1024 - DNA, 28 bp, Artificial Sequence
  Description of Artificial Sequence: Synthetic oligonucleotide
  BBa_J61105
tctagagaaagacatgacgtactagatg

SEQ ID NO: 1025 - DNA, 28 bp, Artificial Sequence
  Description of Artificial Sequence: Synthetic oligonucleotide
  BBa_J61106
tctagagaaagataggagacactagatg

SEQ ID NO: 1026 - DNA, 28 bp, Artificial Sequence
  Description of Artificial Sequence: Synthetic oligonucleotide
  BBa_J61107
tctagagaaagaagagactcactagatg

SEQ ID NO: 1027 - DNA, 28 bp, Artificial Sequence
  Description of Artificial Sequence: Synthetic oligonucleotide
  BBa_J61108
tctagagaaagacgagatatactagatg

SEQ ID NO: 1028 - DNA, 28 bp, Artificial Sequence
  Description of Artificial Sequence: Synthetic oligonucleotide
  BBa_J61109
tctagagaaagactggagacactagatg

SEQ ID NO: 1029 - DNA, 28 bp, Artificial Sequence
  Description of Artificial Sequence: Synthetic oligonucleotide
  BBa_J61110
tctagagaaagaggcgaattactagatg

SEQ ID NO: 1030 - DNA, 28 bp, Artificial Sequence
  Description of Artificial Sequence: Synthetic oligonucleotide
  BBa_J61111
tctagagaaagaggcgatacactagatg

SEQ ID NO: 1031 - DNA, 28 bp, Artificial Sequence
  Description of Artificial Sequence: Synthetic oligonucleotide
  BBa_J61112
tctagagaaagaggtgacatactagatg

SEQ ID NO: 1032 - DNA, 28 bp, Artificial Sequence
  Description of Artificial Sequence: Synthetic oligonucleotide
  BBa_J61113
tctagagaaagagtggaaaaactagatg

SEQ ID NO: 1033 - DNA, 28 bp, Artificial Sequence
  Description of Artificial Sequence: Synthetic oligonucleotide
  BBa_J61114
tctagagaaagatgagaagaactagatg

SEQ ID NO: 1034 - DNA, 28 bp, Artificial Sequence
  Description of Artificial Sequence: Synthetic oligonucleotide
  BBa_J61115
tctagagaaagaagggatacactagatg

SEQ ID NO: 1035 - DNA, 28 bp, Artificial Sequence
  Description of Artificial Sequence: Synthetic oligonucleotide
  BBa_J61116
tctagagaaagacatgaggcactagatg

SEQ ID NO: 1036 - DNA, 28 bp, Artificial Sequence
  Description of Artificial Sequence: Synthetic oligonucleotide
  BBa_J61117
tctagagaaagacatgagttactagatg

SEQ ID NO: 1037 - DNA, 28 bp, Artificial Sequence
  Description of Artificial Sequence: Synthetic oligonucleotide
  BBa_J61118
tctagagaaagagacgaatcactagatg

SEQ ID NO: 1038 - DNA, 28 bp, Artificial Sequence
  Description of Artificial Sequence: Synthetic oligonucleotide
  BBa_J61119
tctagagaaagatttgatatactagatg

SEQ ID NO: 1039 - DNA, 28 bp, Artificial Sequence
  Description of Artificial Sequence: Synthetic oligonucleotide
  BBa_J61120
tctagagaaagacgcgagaaactagatg

SEQ ID NO: 1040 - DNA, 28 bp, Artificial Sequence
  Description of Artificial Sequence: Synthetic oligonucleotide
  BBa_J61121
tctagagaaagagacgagtcactagatg

SEQ ID NO: 1041 - DNA, 28 bp, Artificial Sequence
  Description of Artificial Sequence: Synthetic oligonucleotide
  BBa_J61122
tctagagaaagagaggagccactagatg

SEQ ID NO: 1042 - DNA, 28 bp, Artificial Sequence
  Description of Artificial Sequence: Synthetic oligonucleotide
  BBa_J61123
tctagagaaagagatgactaactagatg

SEQ ID NO: 1043 - DNA, 28 bp, Artificial Sequence
  Description of Artificial Sequence: Synthetic oligonucleotide
  BBa_J61124
tctagagaaagagccgacatactagatg

SEQ ID NO: 1044 - DNA, 28 bp, Artificial Sequence
  Description of Artificial Sequence: Synthetic oligonucleotide
  BBa_J61125
tctagagaaagagccgagttactagatg

SEQ ID NO: 1045 - DNA, 28 bp, Artificial Sequence
  Description of Artificial Sequence: Synthetic oligonucleotide
  BBa_J61126
tctagagaaagaggtgactcactagatg

SEQ ID NO: 1046 - DNA, 28 bp, Artificial Sequence
  Description of Artificial Sequence: Synthetic oligonucleotide
  BBa_J61127
tctagagaaagagtggaactactagatg

SEQ ID NO: 1047 - DNA, 28 bp, Artificial Sequence
  Description of Artificial Sequence: Synthetic oligonucleotide
  BBa_J61128
tctagagaaagataggactcactagatg

SEQ ID NO: 1048 - DNA, 28 bp, Artificial Sequence
  Description of Artificial Sequence: Synthetic oligonucleotide
  BBa_J61129
tctagagaaagattggacgtactagatg

SEQ ID NO: 1049 - DNA, 28 bp, Artificial Sequence
  Description of Artificial Sequence: Synthetic oligonucleotide
  BBa_J61130
tctagagaaagaaacgacatactagatg

SEQ ID NO: 1050 - DNA, 28 bp, Artificial Sequence
  Description of Artificial Sequence: Synthetic oligonucleotide
  BBa_J61131
tctagagaaagaaccgaattactagatg

SEQ ID NO: 1051 - protein, 26 aa, Artificial Sequence
  Description of Artificial Sequence: Synthetic peptide
  polypeptide linker
SSADDAKKDAAKKDDAKKDDAKKDAS

SEQ ID NO: 1052 - protein, 15 aa, Artificial Sequence
  Description of Artificial Sequence: Synthetic peptide
  polypeptide linker
GGGGSGGGGSGGGGS

SEQ ID NO: 1053 - protein, 197 aa, Artificial Sequence
  Description of Artificial Sequence: Synthetic polypeptide
RNLPVATPDPGMFPCLHHSQNLLRAVSNMLQKARQTLEFYPCTSEEIDHEDITKDKTSTVEACLPLELTKNESCLNSRETSFITNGSCLASRKTSFMMALCLSSIYEDLKMYQVEFKTMNAKLLMDPKRQIFLDQNMLAVIDELMQALNFNSETVPQKSSLEEPDFYKTKIKLCILLHAFRIRAVTIDRVMSYLNAS

SEQ ID NO: 1054 - protein, 306 aa, Artificial Sequence
  Description of Artificial Sequence: Synthetic polypeptide
IWELKKDVYVVELDWYPDAPGEMVVLTCDTPEEDGITWTLDQSSEVLGSGKTLTIQVKEFGDAGQYTCHKGGEVLSHSLLLLHKKEDGIWSTDILKDQKEPKNKTFLRCEAKNYSGRFTCWWLTTISTDLTFSVKSSRGSSDPQGVTCGAATLSAERVRGDNKEYEYSVECQEDSACPAAEESLPIEVMVDAVHKLKYENYTSSFFIRDIIKPDPPKNLQLKPLKNSRQVEVSWEYPDTWSTPHSYFSLTFCVQVQGKSKREKKDRVFTDKTSATVICRKNASISVRAQDRYYSSSWSEWASVPCS

SEQ ID NO: 1055 - protein, 197 aa, Artificial Sequence; identical to SEQ ID NO: 1053
  Description of Artificial Sequence: Synthetic polypeptide

SEQ ID NO: 1056 - protein, 313 aa, Artificial Sequence
  Description of Artificial Sequence: Synthetic polypeptide
MWELEKDVYVVEVDWTPDAPGETVNLTCDTPEEDDITWTSDQRHGVIGSGKTLTITVKEFLDAGQYTCHKGGETLSHSHLLLHKKENGIWSTEILKNFKNKTFLKCEAPNYSGRFTCSWLVQRNMDLKFNIKSSSSSPDSRAVTCGMASLSAEKVTLDQRDYEKYSVSCQEDVTCPTAEETLPIELALEARQQNKYENYSTSFFIRDIIKPDPPKNLQMKPLKNSQVEVSWEYPDSWSTPHSYFSLKFFVRIQRKKEKMKETEEGCNQKGAFLVEKTSTEVQCKGGNVCVQAQDRYYNSSCSKWACVPCRVRS

SEQ ID NO: 1057 - protein, 114 aa, Artificial Sequence
  Description of Artificial Sequence: Synthetic polypeptide
NWVNVISDLKKIEDLIQSMHIDATLYTESDVHPSCKVTAMKCFLLELQVISLESGDASIHDTVENLIILANNSLSSNGNVTESGCKECEELEEKNIKEFLQSFVHIVQMFINTS

SEQ ID NO: 1058 - protein, 127 aa, Artificial Sequence [sequence omitted]

SEQ ID NO: 1059 - protein, 177 aa, Artificial Sequence
  Description of Artificial Sequence: Synthetic polypeptide
GPQREEFPRDLSLISPLAQAVRSSSRTPSDKPVAHVVANPQAEGQLQWLNRRANALLANGVELRDNQLVVPSEGLYLIYSQVLFKGQGCPSTHVLLTHTISRIAVSYQTKVNLLSAIKSPCQRETPEGAEAKPWYEPIYLGGVFQLEKGDRLSAEINRPDYLDFAESGQVYFGIIAL

SEQ ID NO: 1060 - protein, 138 aa, Artificial Sequence
  Description of Artificial Sequence: Synthetic polypeptide
QDPYVKEAENLKKYFNAGHSDVADNGTLFLGILKNWKEESDRKIMQSQIVSFYFKLFKNFKDDQSIQKSVETIKEDMNVKFFNSNKKKRDDFEKLTNYSVTDLNVQRKAIHELIQVMAELSPAAKTGKRKRSQMLFRG

SEQ ID NO: 1061 - protein, 73 aa, Artificial Sequence
  Description of Artificial Sequence: Synthetic polypeptide
VPLSRTVRCTCISISNQPVNPRSLEKLEIIPASQFCPRVEIIATMKKKGEKRCLNPESKAIKNLLKAVSKERS

SEQ ID NO: 1062 - protein, 125 aa, Artificial Sequence
  Description of Artificial Sequence: Synthetic polypeptide
MKKSGVLFLLGIILLVLIGVQGTPVVRKGRCSCISTNQGTIHLQSLKDLKQFAPSPSCEKIEIIATLKNGVQTCLNPDSADVKELIKKWEKQVSQKKKQKNGKKHQKKKVLKVRKSQRSRQKKTT

SEQ ID NO: 1063 - DNA, 594 bp, Artificial Sequence
  Description of Artificial Sequence: Synthetic polynucleotide
aggaacctgcctgtggcaacaccagaccctgggatgttcccttgcttacatcattcccagaacctgttgcgtgcggtgtctaacatgctgcagaaagccaggcagacgctggaattctacccatgcacttccgaagagatagatcatgaagacattacgaaagacaaaacctcaacggttgaagcatgcttacctctggaattgactaagaatgaatcgtgcttaaactcaagagagaccagtttcatcactaatggctcttgcttagcgtcgcgcaagaccagcttcatgatggcgctctgcctaagtagcatctacgaggacctcaaaatgtaccaagttgaatttaaaactatgaatgccaaacttctaatggacccaaaaagacagatatttttagatcagaatatgcttgcggttattgacgaactcatgcaggcattgaattttaattccgagacggtgccacaaaaaagttctttggaggagccggacttttacaagacaaaaatcaagctgtgcatacttcttcacgcattcagaatacgggccgttacgatcgatcgcgtcatgtcgtatcttaatgcgagctga

SEQ ID NO: 1064 - DNA, 924 bp, Artificial Sequence
  Description of Artificial Sequence: Synthetic polynucleotide
atctgggaactgaaaaaagatgtttatgtagttgaactggattggtacccggatgcacccggtgagatggtggttttgacctgcgacacgccggaagaagatggcataacgtggaccctggatcaaagctctgaagttctgggttcaggtaagacattgacgatccaagtaaaagaatttggcgacgcaggtcagtacacctgccacaaaggtggcgaagttctgtcgcactcactcctgctcctgcacaaaaaagaggatggcatctggagtactgatatcctaaaggatcaaaaagaacctaaaaacaaaacgttcttgcgctgtgaagcgaagaactatagtggtcgctttacgtgctggtggttgactaccatttccaccgatttgaccttttctgttaagagttcgcgcggctcgtcagatccgcagggcgttacttgcggtgcggcgacgctgtcagctgagagagttcgtggggacaacaaagagtacgaatatagtgtagaatgtcaagaggattcggcgtgcccggcagcagaggagtctctccccattgaagttatggtggacgcagtgcataaactgaaatatgagaattacacatcaagcttttttattcgcgatatcatcaaaccggatcctccaaaaaatctgcaactaaagcccctgaaaaattcgcgccaagttgaggtgagctgggaatatccggatacttggtcgacaccgcattcttatttctcactgaccttctgcgttcaggttcaaggtaaatcaaaacgagaaaaaaaggatcgcgtctttaccgacaaaacgtctgctactgtaatctgccgcaagaatgcgtcaatttctgtacgtgcgcaagatcgctactactctagtagttggtctgaatgggcttcagtgccatgctcctgatga

SEQ ID NO: 1065 - DNA, 594 bp, Artificial Sequence
  Description of Artificial Sequence: Synthetic polynucleotide
cgtaaccttccggtggccacgccagatccgggcatgttcccgtgcttacaccattcccagaatctgctgcgcgctgtgagtaatatgctgcagaaggcgagacaaactttggaattttacccgtgcacttcggaggagattgaccatgaggatatcacaaaagacaaaaccagtacagtggaagcctgcctgccccttgaactgactaaaaatgagagttgtttaaattcacgcgaaaccagcttcattactaacggaagctgcttagcatcgcggaaaaccagttttatgatggccctttgcctttcatctatttacgaggaccttaaaatgtatcaagttgaatttaagactatgaacgcgaaactgctaatggatcccaagcgacaaatctttcttgatcaaaatatgttggctgttattgatgaactgatgcaagccctgaattttaactcagaaaccgtacctcagaaatcgagtttagaagaacccgatttctacaaaactaaaatcaagttgtgtatccttttacatgccttccggattcgggccgtcactattgatcgcgtgatgtcgtacttgaatgcctcctaa

SEQ ID NO: 1066 - DNA, 942 bp, Artificial Sequence
  Description of Artificial Sequence: Synthetic polynucleotide
atgtgggaattggaaaaagacgtgtatgttgttgaagttgactggactccggacgcgcctggtgaaactgttaatctgacttgtgatacaccggaggaagatgatataacttggactagcgatcaacgacacggcgtaatcggctctggtaagactttgaccattactgtgaaggaattcttggatgcggggcaatatacgtgtcataaaggcggcgagacgctgtcacactctcacctgttgttacataaaaaagagaatggtatatggtctacggagatcttgaaaaactttaaaaacaaaacttttttgaagtgtgaggctccaaactattctggtcgctttacctgtagttggttggtgcaacgtaacatggatctcaaatttaacataaagtcgtcttcgtcttctcccgatagccgagcggttacctgtggcatggctagtttgtcggcggagaaggtgaccttggatcaacgtgattatgaaaaatatagcgtttcgtgccaagaggacgttacgtgccctaccgctgaagagactttgccgattgaattggcactggaagcacgacaacaaaataaatacgagaattactcaactagtttcttcatccgagatatcataaaaccggaccccccgaagaatctgcaaatgaaaccgcttaaaaattcacaggtagaggtttcgtgggagtacccggatagttggtctacgcctcattcgtattttagcctgaaatttttcgttcgaatacagcgaaaaaaagagaagatgaaagaaactgaagaagggtgtaaccaaaaaggtgcatttctggtggagaaaactagcaccgaggttcaatgcaaaggcggtaacgtgtgcgtacaagctcaagaccgttattataacagtagctgttctaaatgggcttgcgtgccctgccgcgtgagatcatga

SEQ ID NO: 1067 - DNA, 345 bp, Artificial Sequence
  Description of Artificial Sequence: Synthetic polynucleotide
aattgggttaatgttatatctgatttgaaaaaaatagaggatctgattcaatcaatgcacatagatgcgactctgtatactgagagcgatgtgcacccgagttgcaaagttactgctatgaaatgttttctgctggagctgcaagttatctctctggagagtggtgatgcgtctattcacgatactgttgagaatctgattattctggctaataactcgctgtcaagtaatgggaatgttacggaatctggctgtaaggagtgtgaagaattagaagaaaaaaatattaaagagtttctgcagagttttgtgcacattgttcagatgtttatcaatactagctga

SEQ ID NO: 1068 - DNA, 384 bp, Artificial Sequence
  Description of Artificial Sequence: Synthetic polynucleotide
gcaccggcccgcagcccatcaccgtcaactcaaccttgggaacatgtaaatgctattcaagaagctcgccgcctgttgaatttgagtcgcgatactgcagcagagatgaatgagactgtagaggtgatttcagaaatgtttgacctgcaggagccgacttgtttgcaaactcgcctggagctgtacaaacaaggcctgcgtggctcgctgactaaactgaaaggtcctctgacgatgatggcttctcattataaacaacactgcccgcctactccggagacgtcttgcgcgacccagataattacttttgaatcttttaaagagaatctgaaagactttctgctggttatcccgtttgattgttgggaaccggttcaagaataa

SEQ ID NO: 1069 - DNA, 534 bp, Artificial Sequence
  Description of Artificial Sequence: Synthetic polynucleotide
ggtccgcagagggaagaattcccgcgcgatttgagcctgatttcacctcttgctcaggctgtccgctcctcttcgcgtaccccctcggataaacctgtcgcgcacgtggttgcgaacccgcaagcggaagggcagctgcaatggttaaaccgccgggctaatgcactgctggctaatggagttgagttacgcgacaaccaacttgtcgttccttcggaagggctgtatctgatctattcacaggttctctttaaagggcagggttgcccatcaacccacgtgctcctgacacacacgatcagtcgtatcgcggtatcctatcagacgaaagttaacctcctgtcagcgattaaatcgccgtgtcagagagaaactccagagggtgcggaagctaaaccgtggtatgaacctatttatcttggtggagttttccagttggaaaaaggtgatagactgtcggcagagatcaatcgccctgattacctggatttcgctgagtcgggtcaggtttatttcggaattattgcactgtga

SEQ ID NO: 1070 - DNA, 417 bp, Artificial Sequence
  Description of Artificial Sequence: Synthetic polynucleotide
caggatccttacgttaaagaagcagagaatctgaaaaaatactttaatgcaggccacagcgatgtggcagataatggcacgttattcctgggcattctgaaaaattggaaagaagaatctgaccggaagatcatgcaatctcagatcgtatcattttatttcaagttgtttaaaaacttcaaggatgaccagtcgattcaaaaatcagtggaaacgatcaaagaagatatgaacgttaagttcttcaactcaaataaaaaaaaacgcgatgatttcgaaaaactgactaattattcggtaactgatttgaatgttcagcgcaaggcgattcatgaattgattcaggttatggcagaactgtcgccagcggcaaaaacgggtaaacgaaaacgttctcagatgttgtttcgtggttga

SEQ ID NO: 1071 - DNA, 222 bp, Artificial Sequence
  Description of Artificial Sequence: Synthetic polynucleotide
gtgcccctgagccgcaccgtgcgttgtacgtgtatctccatctcaaaccagccggtaaacccgcgtagtttagaaaaactggagattatcccagccagccagttttgcccgcgcgttgagattattgcgaccatgaagaaaaaaggggaaaaacgttgccttaatccagaaagtaaggctatcaaaaacctgttgaaagctgtctcgaaagagcgttcctaa

SEQ ID NO: 1072 - protein, 95 aa, Artificial Sequence
  Description of Artificial Sequence: Synthetic polypeptide
MMKRNILAVIVPALLVAGTANAVPLSRTVRCTCISISNQPVNPRSLEKLEIIPASQFCPRVEIIATMKKKGEKRCLNPESKAIKNLLKAVSKERS

SEQ ID NO: 1073 - protein, 94 aa, Artificial Sequence
  Description of Artificial Sequence: Synthetic polypeptide
MKQSTIALALLPLLFTPVTKAVPLSRTVRCTCISISNQPVNPRSLEKLEIIPASQFCPRVEIIATMKKKGEKRCLNPESKAIKNLLKAVSKERS

SEQ ID NO: 1074 - protein, 112 aa, Artificial Sequence
  Description of Artificial Sequence: Synthetic polypeptide
MNNNDLFQASRRRFLAQLGGLTVAGMLGPSLLTPRRATAVPLSRTVRCTCISISNQPVNPRSLEKLEIIPASQFCPRVEIIATMKKKGEKRCLNPESKAIKNLLKAVSKERS

SEQ ID NO: 1075 - protein, 125 aa, Artificial Sequence
  Description of Artificial Sequence: Synthetic polypeptide
MMKRNILAVIVPALLVAGTANATPVVRKGRCSCISTNQGTIHLQSLKDLKQFAPSPSCEKIEIIATLKNGVQTCLNPDSADVKELIKKWEKQVSQKKKQKNGKKHQKKKVLKVRKSQRSRQKKTT

SEQ ID NO: 1076 - protein, 124 aa, Artificial Sequence
  Description of Artificial Sequence: Synthetic polypeptide
MKQSTIALALLPLLFTPVTKATPVVRKGRCSCISTNQGTIHLQSLKDLKQFAPSPSCEKIEIIATLKNGVQTCLNPDSADVKELIKKWEKQVSQKKKQKNGKKHQKKKVLKVRKSQRSRQKKTT

SEQ ID NO: 1077 - protein, 142 aa, Artificial Sequence
  Description of Artificial Sequence: Synthetic polypeptide
MNNNDLFQASRRRFLAQLGGLTVAGMLGPSLLTPRRATATPVVRKGRCSCISTNQGTIHLQSLKDLKQFAPSPSCEKIEIIATLKNGVQTCLNPDSADVKELIKKWEKQVSQKKKQKNGKKHQKKKVLKVRKSQRSRQKKTT

SEQ ID NO: 1078 - protein, 126 aa, Artificial Sequence
  Description of Artificial Sequence: Synthetic polypeptide
MKQSTIALALLPLLFTPVTKATLVIRNARCSCISTSRGTIHYKSLKDLKQFAPSPNCNKTEIIATLKNGDQTCLDPDSANVKKLMKEWEKKISQKKKQKRGKKHQKNMKNRKPKTPQSRRRSRKTT

SEQ ID NO: 1079 - protein, 127 aa, Artificial Sequence
  Description of Artificial Sequence: Synthetic polypeptide
MMKRNILAVIVPALLVAGTANATLVIRNARCSCISTSRGTIHYKSLKDLKQFAPSPNCNKTEIIATLKNGDQTCLDPDSANVKKLMKEWEKKISQKKKQKRGKKHQKNMKNRKPKTPQSRRRSRKTT

SEQ ID NO: 1080 - protein, 144 aa, Artificial Sequence
  Description of Artificial Sequence: Synthetic polypeptide
MNNNDLFQASRRRFLAQLGGLTVAGMLGPSLLTPRRATATLVIRNARCSCISTSRGTIHYKSLKDLKQFAPSPNCNKTEIIATLKNGDQTCLDPDSANVKKLMKEWEKKISQKKKQKRGKKHQKNMKNRKPKTPQSRRRSRKTT

SEQ ID NO: 1081 - DNA, 285 bp, Artificial Sequence
  Description of Artificial Sequence: Synthetic polynucleotide
atgaagcagagcaccatcgcgcttgccctgctgccgttgcttttcacgcctgtcaccaaggctgtgcccctgagccgcaccgtgcgttgtacgtgtatctccatctcaaaccagccggtaaacccgcgtagtttagaaaaactggagattatcccagccagccagttttgcccgcgcgttgagattattgcgaccatgaagaaaaaaggggaaaaacgttgccttaatccagaaagtaaggctatcaaaaacctgttgaaagctgtctcgaaagagcgttcctaa

SEQ ID NO: 1082 - DNA, 297 bp, Artificial Sequence
  Description of Artificial Sequence: Synthetic polynucleotide
atgaagcagagcaccatcgcgcttgccctgctgccgttgcttttcacgcctgtcaccaaggctatcccactggctcgcacagtccgctgtaattgcatccacatcgatgacggtcctgtgcgtatgcgtgcaatcggtaaacttgaaattatccctgcctccttatcgtgtccccgcgtagagattatcgccacgatgaagaaaaacgatgaacagcgttgtcttaacccagagagcaaaactatcaaaaacctgatgaaggcttttagtcaaaagcgcagtaagcgcgcaccataa

SEQ ID NO: 1083 - DNA, 375 bp, Artificial Sequence
  Description of Artificial Sequence: Synthetic polynucleotide
atgaagcagagcaccatcgcgcttgccctgctgccgttgcttttcacgcctgtcaccaaggctacacccgtagtgcgtaaagggcgctgcagttgcatctcgactaaccaggggacaatccacctgcagtcgctgaaagatttgaagcagtttgcaccgagccctagttgtgaaaaaatcgagatcatcgctacattaaagaacggcgtccaaacatgtcttaaccccgactcagcagatgttaaagaacttattaagaaatgggagaagcaggtaagtcagaaaaagaaacagaaaaatggcaagaaacatcagaaaaagaaagtcttaaaggttcgtaaatcgcagcgttctcgtcaaaagaagacgacgtaa

SEQ ID NO: 1084 - DNA, 381 bp, Artificial Sequence
  Description of Artificial Sequence: Synthetic polynucleotide
atgaagcagagcaccatcgcgcttgccctgctgccgttgcttttcacgcctgtcaccaaggctacgctggtgatccgtaacgcccgctgttcatgcatcagcacttctcgtggaaccatccactataaatcattaaaggacttgaaacagtttgcaccttcaccaaattgtaacaagacggaaattattgctactctgaaaaacggagatcaaacttgcctggaccccgactctgcaaacgtgaagaagctgatgaaggaatgggaaaaaaaaatctctcaaaagaaaaagcaaaagcgcggtaagaaacatcagaagaacatgaagaatcgtaagccaaagacccctcagtcgcgccgtcgttctcgtaagacgacgtaa

SEQ ID NO: 1085 - DNA, 284 bp, Artificial Sequence
  Description of Artificial Sequence: Synthetic polynucleotide
atgaagcagagcaccatcgcgcttgccctgctgccgttgcttttcacgcctgtcaccaaggctgtgcccctgagccgcaccgtgcgttgtacgtgtatctccatctcaaaccagccggtaaacccgcgtagtttagaaaaactggagattatcccagccagccagttttgcccgcgcgttgagattattgcgaccatgaagaaaaaaggggaaaaacgttgccttaatccagaaagtaaggctatcaaaaacctgttgaaagctgtctcgaaagagcgttccta

SEQ ID NO: 1086 - DNA, 1204 bp, Artificial Sequence
  Description of Artificial Sequence: Synthetic polynucleotide
ccaggatacatagattaccacaactccgagcccttccaccttaagacccactttcacatttaagttgtttttctaatccgcatatgatcaattcaaggccgaataagaaggctggctctgcaccttggtgatcaaataattcgatagcttgtcgtaataatggcggcatactatcagtagtaggtgtttccctttcttctttagcgacttgatgctcttgatcttccaatacgcaacctaaagtaaaatgccccacagcgctgagtgcatataatgcattctctagtgaaaaaccttgttggcataaaaaggctaattgattttcgagagtttcatactgtttttctgtaggccgtgtacctaaatgtacttttgctccatcgcgatgacttagtaaagcacatctaaaacttttagcgttattacgtaaaaaatcttgccagctttccccttctaaagggcaaaagtgagtatggtgcctatctaacatctcaatggctaaggcgtcgagcaaagcccgcttattttttacatgccaatacaatgtaggctgctctacacctagcttctgggcgagtttacgggttgttaaaccttcgattccgacctcattaagcagctctaatgcgctgttaatcactttacttttatctaatctagacatcattaattcctaatttttgttgacactctatcattgatagagttattttaccactccctatcagtgatagagaaaagtgaaataagtttatcaaaataaaaggaggtaatatatgaagcagagcaccatcgcgcttgccctgctgccgttgcttttcacgcctgtcaccaaggctatcccactggctcgcacagtccgctgtaattgcatccacatcgatgacggtcctgtgcgtatgcgtgcaatcggtaaacttgaaattatccctgcctccttatcgtgtccccgcgtagagattatcgccacgatgaagaaaaacgatgaacagcgttgtcttaacccagagagcaaaactatcaaaaacctgatgaaggcttttagtcaaaagcgcagtaagcgcgcaccataaaacgattggtaaacccggtgaacgcatgagaaagcccccggaagatcaccttccgggggcttttttattgcgcggaccaaaacgaaaaaagacgctcgaaagcgtctcttttctggaatttggtaccgagg

SEQ ID NO: 1087 - DNA, 375 bp, Artificial Sequence; identical to SEQ ID NO: 1083
  Description of Artificial Sequence: Synthetic polynucleotide

SEQ ID NO: 1088 - DNA, 1288 bp, Artificial Sequence
  Description of Artificial Sequence: Synthetic polynucleotide
ccaggatacatagattaccacaactccgagcccttccaccttaagacccactttcacatttaagttgtttttctaatccgcatatgatcaattcaaggccgaataagaaggctggctctgcaccttggtgatcaaataattcgatagcttgtcgtaataatggcggcatactatcagtagtaggtgtttccctttcttctttagcgacttgatgctcttgatcttccaatacgcaacctaaagtaaaatgccccacagcgctgagtgcatataatgcattctctagtgaaaaaccttgttggcataaaaaggctaattgattttcgagagtttcatactgtttttctgtaggccgtgtacctaaatgtacttttgctccatcgcgatgacttagtaaagcacatctaaaacttttagcgttattacgtaaaaaatcttgccagctttccccttctaaagggcaaaagtgagtatggtgcctatctaacatctcaatggctaaggcgtcgagcaaagcccgcttattttttacatgccaatacaatgtaggctgctctacacctagcttctgggcgagtttacgggttgttaaaccttcgattccgacctcattaagcagctctaatgcgctgttaatcactttacttttatctaatctagacatcattaattcctaatttttgttgacactctatcattgatagagttattttaccactccctatcagtgatagagaaaagtgaaataagtttatcaaaataaaaggaggtaatatatgaagcagagcaccatcgcgcttgccctgctgccgttgcttttcacgcctgtcaccaaggctacgctggtgatccgtaacgcccgctgttcatgcatcagcacttctcgtggaaccatccactataaatcattaaaggacttgaaacagtttgcaccttcaccaaattgtaacaagacggaaattattgctactctgaaaaacggagatcaaacttgcctggaccccgactctgcaaacgtgaagaagctgatgaaggaatgggaaaaaaaaatctctcaaaagaaaaagcaaaagcgcggtaagaaacatcagaagaacatgaagaatcgtaagccaaagacccctcagtcgcgccgtcgttctcgtaagacgacgtaaaacgattggtaaacccggtgaacgcatgagaaagcccccggaagatcaccttccgggggcttttttattgcgcggaccaaaacgaaaaaagacgctcgaaagcgtctcttttctggaatttggtaccgagg

SEQ ID NO: 1089 - DNA, 858 bp, Artificial Sequence
  Description of Artificial Sequence: Synthetic polynucleotide
aaacaatcgaccatcgcattggcgctgcttcctctattgttcacaccggtgacaaaggcagtcgactataaggatgacgacgacaagcaattgggcggtggccaccgtcgtttggacaaggtggaggaggaagtcaacttgcatgaagattttgtatttatcaagaaattaaagcgttgtaacaagggtgaagggagcttgagtttacttaactgtgaagaaatgcgccgccaattcgaggacttggttaaggacattacccttaacaaggaagaaaagaaagagaacagcttcgaaatgcagcgtggcgatgaagacccccagatcgcggcacatgtcgtttccgaggcaaattcgaatgctgcttcagtcttacaatgggcgaaaaagggctactacacgatgaagtcaaacttagtgatgcttgaaaatggcaagcaattaaccgtgaagcgcgaaggattgtattatgtctacacccaagtaacattttgctccaatcgcgaaccgtcgtcgcagcgccctttcatcgttggtttgtggttgaagccgagctccggttccgagcgtattcttttgaaagccgcaaacacccacagcagctcgcagctgtgtgaacagcagagcgtccacctgggcggcgtatttgaattgcaagcgggagcgtcagttttcgttaatgtgactgaggcttctcaagttatccatcgtgtcggtttctccagcttcggcttactgaagttaaagggcgagctcaattcgaagcttgaaggtaagcctatccctaaccctctcctcggcctcgattctacggatccgaattcgagctccgtcgaccatcaccatcaccaccactga

SEQ ID NO: 1090 - DNA, 791 bp, Artificial Sequence
  Description of Artificial Sequence: Synthetic polynucleotide
tgactagtaaacaatcgaccatcgcattggcgctgcttcctctattgttcacaccggtgacaaaggcagtcgactataaggatgacgacgacaagcaattgggcggtggcatgcaacgtggcgatgaggacccgcaaattgccgcgcatgttgtgtccgaagcgaactccaatgccgcatccgtcctgcaatgggctaagaaaggctattacacgatgaaatcaaacctggttatgcttgagaacggaaagcagcttacagtcaagcgtgagggcctgtattacgtctacacccaagttaccttttgctctaaccgtgagcccagcagccaacgcccttttattgtaggcctgtggttaaagccctcgtcgggttctgaacgcattcttctgaaagctgcgaatacgcactctagtagccagctgtgtgagcaacaatctgtccatcttggtggagtttttgagttacaagctggagcatctgtgttcgtgaatgtaacggaagcatctcaagttatccaccgtgtaggcttctcatcttttggtttattaaaattaaagggcgagctcaattcgaagcttgaaggtaagcctatccctaaccctctcctcggcctcgattctacggatccgaattcgagctccgtcgaccatcaccatcaccaccactgagcatgctaatcagccgtggaattcggtctcaggaggatcagttctggaccagcgagctgtgctgcgactcgtggcgtaatcatggtcatagctgtttcctgtgtgaaattgttatccgct

SEQ ID NO: 1091 - protein, 288 aa, Artificial Sequence
  Description of Artificial Sequence: Synthetic polypeptide
MTSKQSTIALALLPLLFTPVTKAVDYKDDDDKQLGGGHRRLDKVEEEVNLHEDFVFIKKLKRCNKGEGSLSLLNCEEMRRQFEDLVKDITLNKEEKKENSFEMQRGDEDPQIAAHVVSEANSNAASVLQWAKKGYYTMKSNLVMLENGKQLTVKREGLYYVYTQVTFCSNREPSSQRPFIVGLWLKPSSGSERILLKAANTHSSSQLCEQQSVHLGGVFELQAGASVFVNVTEASQVIHRVGFSSFGLLKLKGELNSKLEGKPIPNPLLGLDSTDPNSSSVDHHHHHH

SEQ ID NO: 1092 - protein, 223 aa, Artificial Sequence
  Description of Artificial Sequence: Synthetic polypeptide
MTSKQSTIALALLPLLFTPVTKAVDYKDDDDKQLGGGMQRGDEDPQIAAHVVSEANSNAASVLQWAKKGYYTMKSNLVMLENGKQLTVKREGLYYVYTQVTFCSNREPSSQRPFIVGLWLKPSSGSERILLKAANTHSSSQLCEQQSVHLGGVFELQAGASVFVNVTEASQVIHRVGFSSFGLLKLKGELNSKLEGKPIPNPLLGLDSTDPNSSSVDHHHHHH

SEQ ID NO: 1093 - protein, 215 aa, Artificial Sequence
  Description of Artificial Sequence: Synthetic polypeptide
HRRLDKIEDERNLHEDFVFMKTIQRCNTGERSLSLLNCEEIKSQFEGFVKDIMLNKEETKKENSFEMQKGDQNPQIAAHVISEASSKTTSVLQWAEKGYYTMSNNLVTLENGKQLTVKRQGLYYIYAQVTFCSNREASSQAPFIASLCLKSPGRFERILLRAANTHSSAKPCGQQSIHLGGVFELQPGASVFVNVTDPSQVSHGTGFTSFGLLKL

SEQ ID NO: 1094 - DNA, 1251 bp, Artificial Sequence
  Description of Artificial Sequence: Synthetic polynucleotide
atgactagtaaacaatcgaccatcgcattggcgctgcttcctctattgttcacaccggtgacaaaggcagtcgactataaggatgacgacgacaagcaattgggcggtggcaaggaactgaaagtcacccagcctgagaagtctgtctcagtagcggcaggtgacagcacggtgcttaactgcacgcttacttcactgctgccggtaggtcccattaaatggtatcgtggcgtgggccaaagtcgtttgttaatctactcctttacgggtgagcactttccgcgcgtaactaatgtaagcgacgcaacaaaacgtaacaacatggatttcagcattcgcatctcaaacgtcactcccgaggatgctgggacttactactgcgtaaaatttcagaaaggcccctcagagcccgatacagaaatccaatcaggaggcggcacagaagtctacgttctggcaaaaccctctccccctgaagtctccggtccagcagatcgtggcattcctgaccaaaaagtaaatttcacgtgcaaatcgcacgggtttagcccacgcaacatcacactgaagtggtttaaagatggtcaggaacttcatcaccttgagactaccgtgaacccgtccggtaaaaacgtttcctacaatatctcgtccactgtgcgtgttgtattgaatagcatggacgttcacagcaaggtgatctgtgaagtcgctcacattacccttgaccgttcaccattgcgtggtatcgcgaacctgagcaatttcatccgtgtcagcccgacggttaaggttactcagcagtccccaacatcgatgaaccaggtaaatctgacgtgtcgtgcagaacgtttttaccctgaagacctgcagttgatttggctggagaacgggaacgtctcgcgcaatgacacacccaaaaatctgacaaagaatactgacggtacgtacaattatacatcactgtttcttgtgaactcctccgcccatcgcgaggacgtagtctttacatgtcaagtcaagcacgatcagcagcccgcgatcacccgtaatcacacagttctgggcctggctcactcatccgatcagggatcaatgcaaacatttccgggaaacaatgcaacccacaactggaataagggcgagctcaattcgaagcttgaaggtaagcctatccctaaccctctcctcggcctcgattctacggatccgaattcgagctccgtcgaccatcaccatcaccaccactga

SEQ ID NO: 1095 - DNA, 564 bp, Artificial Sequence
  Description of Artificial Sequence: Synthetic polynucleotide
atgactagtaaacaatcgaccatcgcattggcgctgcttcctctattgttcacaccggtgacaaaggcagtcgactataaggatgacgacgacaagcaattgggtggtagcgaagaagaactgcagattatccaaccggacaaatctgttctggtggctgcgggtgaaacggctactttgcgctgcacaatcacctcgctgtttccagtcggaccaatccaatggttccgtggtgcgggaccgggtcgcgtgttgatctacaatcagcgtcaaggccctttcccccgtgttactactgtctccgatacaacaaagcgcaacaacatggacttttccatccgtatcgggaatatcacaccggccgacgcgggaacctattattgcatcaagtttcgcaagggatctccagacgatgttgaatttaagagcggggctggaactgagctgtccgtgcgtgcaaaaccttcgggcagcggcgagctcggtggcagtggtaagcctatccctaaccctctcctcggcctcgattctacgggatccggtcatcatcaccatcaccattga

SEQ ID NO: 1096 - DNA, 357 bp, Artificial Sequence
  Description of Artificial Sequence: Synthetic polynucleotide
gaagaagaactgcagattatccaaccggacaaatctgttctggtggctgcgggtgaaacggctactttgcgctgcacaatcacctcgctgtttccagtcggaccaatccaatggttccgtggtgcgggaccgggtcgcgtgttgatctacaatcagcgtcaaggccctttcccccgtgttactactgtctccgatacaacaaagcgcaacaacatggacttttccatccgtatcgggaatatcacaccggccgacgcgggaacctattattgcatcaagtttcgcaagggatctccagacgatgttgaatttaagagcggggctggaactgagctgtccgtgcgtgcaaaaccttcg

SEQ ID NO: 1097 - DNA, 945 bp, Artificial Sequence
  Description of Artificial Sequence: Synthetic polynucleotide
atgactagtaaacaatcgaccatcgcattggcgctgcttcctctattgttcacaccggtgacaaaggcagtcgactataaggatgacgacgacaagcaattgggtggtagcgaggaggaagtgcaaatcattcaacccgacaaaagcgttagtgtcgcggcgggtgagtccgccatcctgcattgcactatcacatccctgtttcccgtaggtcccattcaatggtttcgtggagccggtccggcgcgtgttcttatctacaatcaacgccagggacccttcccgcgtgttacaacgatcagtgaaactacccgtcgtgaaaacatggactttagcatttcgatctccaacattacacccgctgacgcagggacgtactactgcatcaagtttcgtaaaggatctccagacactgagtttaagtctggcgcagggacggagttgtccgtgcgtgcgaaaccttctggcggaggagggtcggggggcggtggttctgaagaggaagttcagattatccaaccagataaatcagtgtccgtggcggcgggagagtcagctatccttcactgtacaatcacatcgttattccctgtagggccaattcagtggttccgtggggcaggacccgcacgtgtccttatctataatcagcgtcaggggcccttcccacgtgttacgacaatttcagagactactcgccgcgagaacatggacttcagtattagcatctcgaacattaccccggcggacgcgggaacttattactgtatcaagtttcgtaaaggctcgccggacaccgagttcaaatccggggcaggcactgagttgagcgtgcgtgcgaaaccatcgggcagcggcgagctcggtggcagtggtaagcctatccctaaccctctcctcggcctcgattctacgggatccggtcatcatcaccatcaccattga

SEQ ID NO: 1098 - DNA, 1224 bp, Artificial Sequence
  Description of Artificial Sequence: Synthetic polynucleotide
atgactagtaaacaatcgaccatcgcattggcgctgcttcctctattgttcacaccggtgacaaaggcacaattgggtggtagcgaggaggagttacaaattatccaaccagataagtctgtcttggtcgcagccggagaaacggcgacgttacgctgcacaatcacctcactgttcccggtcggtccgattcagtggttccgtggagctggtccgggccgtgtcttaatttacaatcaacgtcaaggaccttttccacgcgtaacaactgtttctgacacaaccaaacgtaacaatatggacttttctattcgtattggcaacattacgccagccgatgcaggtacatactactgtatcaaattccgtaaaggtagtcctgatgacgttgagtttaaaagcggcgcagggacggagctttcagtgcgtgcaaagcccagtgctagcgcggcggcgccgccatgcccgccatgccctgcgcccgagttcttgggtgggccttcagtgttcctttttcccccgaaaccaaaagataccctgatgatttcgcgcacccctgaagttacttgtgtggttgttgacgtctcacaagaggacccagaggtacaattcaactggtatgtggacggagtagaggtgcataacgccaagactaagccccgtgaagagcagttcaattctacataccgtgtagtttcggttttaacggtcttacaccaagattggttgaacggaaaggaatataagtgcaaggtgtccaataagggactgccaagcagtatcgaaaaaacaatctcaaaagcaaagggacaaccgcgtgagccccaggtttacactctgccaccgtcgcaagaggagatgacgaagaatcaggtgtcgttaacctgtttggtcaaaggcttttatccaagcgatatcgcagtggaatgggaatcaaatgggcagcctgaaaataactataagacaaccccgcctgtacttgattctgatggatctttttttctttatagtcgcttaaccgtggataaatcccgttggcaggaaggtaatgtcttctcatgctcggttatgcacgaggcccttcataaccattacactcagaagagcctttctctgagtccggggaaaggcagcggcgagctcggtggcagtggtaagcctatccctaaccctctcctcggcctcgattctacgggatccggtcatcatcaccatcaccattga

SEQ ID NO: 1099 - DNA, 1128 bp, Artificial Sequence
  Description of Artificial Sequence: Synthetic polynucleotide
atgactagtaaacaatcgaccatcgcattggcgctgcttcctctattgttcacaccggtgacaaaggcacaattgggtggtagcgaggaggagttacaaattatccaaccagataagtctgtcttggtcgcagccggagaaacggcgacgttacgctgcacaatcacctcactgttcccggtcggtccgattcagtggttccgtggagctggtccgggccgtgtcttaatttacaatcaacgtcaaggaccttttccacgcgtaacaactgtttctgacacaaccaaacgtaacaatatggacttttctattcgtattggcaacattacgccagccgatgcaggtacatactactgtatcaaattccgtaaaggtagtcctgatgacgttgagtttaaaagcggcgcagggacggagctttcagtgcgtgcaaagcccagtgctagcgcggcggcgccgccatgcccgccatgccctgcgcccgagttcttgggtgggccttcagtgttcctttttcccccgaaaccaaaagataccctgatgatttcgcgcacccctgaagttacttgtgtggttgttgacgtctcacaagaggacccagaggtacaattcaactggtatgtggacggagtagaggtgcataacgccaagactaagccccgtgaagagcagttcaattctacataccgtgtagtttcggttttaacggtcttacaccaagattggttgaacggaaaggaatataagtgcaaggtgtccaataagggactgccaagcagtatcgaaaaaacaatctcaaaagcaaagggacaaccgcgtgagccccaggtttacactctgccaccgtcgcaagaggagatgacgaagaatcaggtgtcgttaacctgtttggtcaaaggcttttatccaagcgatatcgcagtggaatgggaatcaaatgggcagcctgaaaataactataagacaaccccgcctgtacttgattctgatggatctttttttctttatagtcgcttaaccgtggataaatcccgttggcaggaaggtaatgtcttctcatgctcggttatgcacgaggcccttcataaccattacactcagaagagcctttctctgagtccggggaaa

SEQ ID NO: 1100 - DNA, 1128 bp, Artificial Sequence; identical to SEQ ID NO: 1099
  Description of Artificial Sequence: Synthetic polynucleotide

SEQ ID NO: 1101 - DNA, 1191 bp, Artificial Sequence
  Description of Artificial Sequence: Synthetic polynucleotide
atgactagtaaacaatcgaccatcgcattggcgctgcttcctctattgttcacaccggtgacaaaggcacaattgggtggtagcgaagaagaggtgcagatcatccaacccgataaatcggtatctgtcgcagctggggagtcggcgattttgcattgcaccattacatctttgttccctgttgggcctattcaatggtttcgcggggcaggtccggcccgcgtattgatttataaccagcgtcaaggaccgttcccccgtgttacaactatttcggaaacaacacgtcgtgaaaatatggatttctcgatctctatctctaacattactcccgccgatgcagggacttattattgcattaaatttcgcaaaggaagccccgacacggagtttaagagtggagcgggcacggaattatcggtgcgcgcgaaacccagtgctagcgcggcggcgccgccatgcccgccatgccctgcgcccgagttcttgggtgggccttcagtgttcctttttcccccgaaaccaaaagataccctgatgatttcgcgcacccctgaagttacttgtgtggttgttgacgtctcacaagaggacccagaggtacaattcaactggtatgtggacggagtagaggtgcataacgccaagactaagccccgtgaagagcagttcaattctacataccgtgtagtttcggttttaacggtcttacaccaagattggttgaacggaaaggaatataagtgcaaggtgtccaataagggactgccaagcagtatcgaaaaaacaatctcaaaagcaaagggacaaccgcgtgagccccaggtttacactctgccaccgtcgcaagaggagatgacgaagaatcaggtgtcgttaacctgtttggtcaaaggcttttatccaagcgatatcgcagtggaatgggaatcaaatgggcagcctgaaaataactataagacaaccccgcctgtacttgattctgatggatctttttttctttatagtcgcttaaccgtggataaatcccgttggcaggaaggtaatgtcttctcatgctcggttatgcacgaggcccttcataaccattacactcagaagagcctttctctgagtccggggaaaggcagcggcgagctcggtggcagtggtaagcctatccctaaccctctcctcggcctcgattctacg

SEQ ID NO: 1102 - DNA, 1041 bp, Artificial Sequence
  Description of Artificial Sequence: Synthetic polynucleotide
gaagaagaggtgcagatcatccaacccgataaatcggtatctgtcgcagctggggagtcggcgattttgcattgcaccattacatctttgttccctgttgggcctattcaatggtttcgcggggcaggtccggcccgcgtattgatttataaccagcgtcaaggaccgttcccccgtgttacaactatttcggaaacaacacgtcgtgaaaatatggatttctcgatctctatctctaacattactcccgccgatgcagggacttattattgcattaaatttcgcaaaggaagccccgacacggagtttaagagtggagcgggcacggaattatcggtgcgcgcgaaacccagtgctagcgcggcggcgccgccatgcccgccatgccctgcgcccgagttcttgggtgggccttcagtgttcctttttcccccgaaaccaaaagataccctgatgatttcgcgcacccctgaagttacttgtgtggttgttgacgtctcacaagaggacccagaggtacaattcaactggtatgtggacggagtagaggtgcataacgccaagactaagccccgtgaagagcagttcaattctacataccgtgtagtttcggttttaacggtcttacaccaagattggttgaacggaaaggaatataagtgcaaggtgtccaataagggactgccaagcagtatcgaaaaaacaatctcaaaagcaaagggacaaccgcgtgagccccaggtttacactctgccaccgtcgcaagaggagatgacgaagaatcaggtgtcgttaacctgtttggtcaaaggcttttatccaagcgatatcgcagtggaatgggaatcaaatgggcagcctgaaaataactataagacaaccccgcctgtacttgattctgatggatctttttttctttatagtcgcttaaccgtggataaatcccgttggcaggaaggtaatgtcttctcatgctcggttatgcacgaggcccttcataaccattacactcagaagagcctttctctgagtccggggaaa

SEQ ID NO: 1103 - DNA, 681 bp, Homo sapiens
gcggcggcgccgccatgcccgccatgccctgcgcccgagttcttgggtgggccttcagtgttcctttttcccccgaaaccaaaagataccctgatgatttcgcgcacccctgaagttacttgtgtggttgttgacgtctcacaagaggacccagaggtacaattcaactggtatgtggacggagtagaggtgcataacgccaagactaagccccgtgaagagcagttcaattctacataccgtgtagtttcggttttaacggtcttacaccaagattggttgaacggaaaggaatataagtgcaaggtgtccaataagggactgccaagcagtatcgaaaaaacaatctcaaaagcaaagggacaaccgcgtgagccccaggtttacactctgccaccgtcgcaagaggagatgacgaagaatcaggtgtcgttaacctgtttggtcaaaggcttttatccaagcgatatcgcagtggaatgggaatcaaatgggcagcctgaaaataactataagacaaccccgcctgtacttgattctgatggatctttttttctttatagtcgcttaaccgtggataaatcccgttggcaggaaggtaatgtcttctcatgctcggttatgcacgaggcccttcataaccattacactcagaagagcctttctctgagtccggggaaa

SEQ ID NO: 1104 - DNA, 929 bp, Artificial Sequence
  Description of Artificial Sequence: Synthetic polynucleotide
atgactagtaaacaatcgaccatcgcattggcgctgcttcctctattgttcacaccggtgacaaaggcacaattgggtggtagccaggttaagttgcttcagtccggtgccgcattagtgaagcctggagcaagtgtcaagatgtcgtgtcaggcaagcgggtacagcttcaccgattattgggtgacgtgggttaaacaatcccacggacaatcattggaatggatcggggaaatctaccccagtaacactgtgacaaattttaacgacaattttaaagggaaggcaacccttacggtggataagtctacttccacagcgtatatggagctgagtcgcctgacttctgaggactctgccatctattactgtacacgtatcgggaacagtgggtatcgtgtagggtggttcatctactgggggcaaggtacccttgtgacagttttatccgggggtggcgggtcgggaggggggggatcaggcggtggagggtcggatacagttctgacccagtctccggcattggcggtgtcaccgggggagcgtgtcacgatcagttgtaaggcatcggaatccgtgtcgagccacatgcactggtaccagcagaaaccggggcagcagcctaaactgttgatttacaaggcatcaaatttagcctctggtgtacccgctcgttttagtggcagtggctcgggaacggacttcactttaacgattgaccctgttgaggcagacgataccgccacttacttctgccagcagggttggaacggcccattcacttttggggccgggacccgtctggaactgaagcgcgcggacgccgctggcagcggcgagctcggtggcagtggtaagcctatccctaaccctctcctcggcctcgattctacgggatccggtcatcaccaccatcaccatcaccattg

SEQ ID NO: 1105 - protein, 415 aa, Artificial Sequence
  Description of Artificial Sequence: Synthetic polypeptide
MTSKQSTIALALLPLLFTPVTKAVDYKDDDDKQLGGGKELKVTQPEKSVSVAAGDSTVLNCTLTSLLPVGPIKWYRGVGQSRLLIYSFTGEHFPRVTNVSDATKRNNMDFSIRISNVTPEDAGTYYCVKFQKGPSEPDTEIQSGGGTEVYVLAKPSPPEVSGPADRGIPDQKVNFTCKSHGFSPRNITLKWFKDGQELHHLETTVNPSGKNVSYNISSTVRVVLNSMDVHSKVICEVAHITLDRSPLRGIANLSNFIRVSPTVKVTQQSPTSMNQVNLTCRAERFYPEDLQLIWLENGNVSRNDTPKNLTKNTDGTYNYTSLFLVNSSAHREDVVFTCQVKHDQQPAITRNHTVLGLAHSSDQGSMQTFPGNNATHNWNKGELNSKEGKPIPNPLLGLDSTDPNSSSVDHHHHHH

SEQ ID NO: 1106 - protein, 187 aa, Artificial Sequence
  Description of Artificial Sequence: Synthetic polypeptide
MTSKQSTIALALLPLLFTPVTKAVDYKDDDDKQLGGSEEELQIIQPDKSVLVAAGETATLRCTITSLFPVGPIQWFRGAGPGRVLIYNQRQGPFPRVTTVSDTTKRNNMDFSIRIGNITPADAGTYYCIKFRKGSPDDVEFKSGAGTELSVRAKPSGSGELGGSGKPIPNPLLGLDSTGSGHHHHHH

SEQ ID NO: 1107 - protein, 119 aa, Artificial Sequence
  Description of Artificial Sequence: Synthetic polypeptide
EEELQIIQPDKSVLVAAGETATLRCTITSLFPVGPIQWFRGAGPGRVLIYNQRQGPFPRVTTVSDTTKRNNMDFSIRIGNITPADAGTYYCIKFRKGSPDDVEFKSGAGTELSVRAKPS

SEQ ID NO: 1108 - protein, 314 aa, Artificial Sequence
  Description of Artificial Sequence: Synthetic polypeptide
MTSKQSTIALALLPLLFTPVTKAVDYKDDDDKQLGGSEEEVQIIQPDKSVSVAAGESAILHCTITSLFPVGPIQWFRGAGPARVLIYNQRQGPFPRVTTISETTRRENMDFSISISNITPADAGTYYCIKFRKGSPDTEFKSGAGTELSVRAKPSGGGGSGGGGSEEEVQIIQPDKSVSVAAGESAILHCTITSLFPVGPIQWFRGAGPARVLIYNQRQGPFPRVTTISETTRRENMDFSISISNITPADAGTYYCIKFRKGSPDTEFKSGAGTELSVRAKPSGSGELGGSGKPIPNPLLGLDSTGSGHHHHHH

SEQ ID NO: 1109 - protein, 246 aa, Artificial Sequence
  Description of Artificial Sequence: Synthetic polypeptide
EEEVQIIQPDKSVSVAAGESAILHCTITSLFPVGPIQWFRGAGPARVLIYNQRQGPFPRVTTISETTRRENMDFSISISNITPADAGTYYCIKFRKGSPDTEFKSGAGTELSVRAKPSGGGGSGGGGSEEEVQIIQPDKSVSVAAGESAILHCTITSLFPVGPIQWFRGAGPARVLIYNQRQGPFPRVTTISETTRRENMDFSISISNITPADAGTYYCIKFRKGSPDTEFKSGAGTELSVRAKPS

SEQ ID NO: 1110 - protein, 416 aa, Artificial Sequence
  Description of Artificial Sequence: Synthetic polypeptide
MTSKQSTIALALLPLLFTPVTKAVDYKDDDDKQLGGSEEELQIIQPDKSVLVAAGETATLRCTITSLFPVGPIQWFRGAGPGRVLIYNQRQGPFPRVTTVSDTTKRNNMDFSIRIGNITPADAGTYYCIKFRKGSPDDVEFKSGAGTELSVRAKPSASAAAPPCPPCPAPEFLGGPSVFLFPPKPKDTLMISRTPEVTCVVVDVSQEDPEVQFNWYVDGVEVHNAKTKPREEQFNSTYRVVSVLTVLHQDWLNGKEYKCKVSNKGLPSSIEKTISKAKGQPREPQVYTLPPSQEEMTKNQVSLTCLVKGFYPSDIAVEWESNGQPENNYKTTPPVLDSDGSFFLYSRLTVDKSRWQEGNVFSCSVMHEALHNHYTQKSLSLSPGKGSGELGGSGKPIPNPLLGLDSTGSGHHHHHH

SEQ ID NO: 1111 - protein, 385 aa, Artificial Sequence
  Description of Artificial Sequence: Synthetic polypeptide
MTSKQSTIALALLPLLFTPVTKAVDYKDDDDKQLGGSEEELQIIQPDKSVLVAAGETATLRCTITSLFPVGPIQWFRGAGPGRVLIYNQRQGPFPRVTTVSDTTKRNNMDFSIRIGNITPADAGTYYCIKFRKGSPDDVEFKSGAGTELSVRAKPSASAAAPPCPPCPAPEFLGGPSVFLFPPKPKDTLMISRTPEVTCVVVDVSQEDPEVQFNWYVDGVEVHNAKTKPREEQFNSTYRVVSVLTVLHQDWLNGKEYKCKVSNKGLPSSIEKTISKAKGQPREPQVYTLPPSQEEMTKNQVSLTCLVKGFYPSDIAVEWESNGQPENNYKTTPPVLDSDGSFFLYSRLTVDKSRWQEGNVFSCSVMHEALHNHYTQKSLSLSPGK

SEQ ID NO: 1112 - protein, 348 aa, Artificial Sequence
  Description of Artificial Sequence: Synthetic polypeptide
EEELQIIQPDKSVLVAAGETATLRCTITSLFPVGPIQWFRGAGPGRVLIYNQRQGPFPRVTTVSDTTKRNNMDFSIRIGNITPADAGTYYCIKFRKGSPDDVEFKSGAGTELSVRAKPSASAAAPPCPPCPAPEFLGGPSVFLFPPKPKDTLMISRTPEVTCVVVDVSQEDPEVQFNWYVDGVEVHNAKTKPREEQFNSTYRVVSVLTVLHQDWLNGKEYKCKVSNKGLPSSIEKTISKAKGQPREPQVYTLPPSQEEMTKNQVSLTCLVKGFYPSDIAVEWESNGQPENNYKTTPPVLDSDGSFFLYSRLTVDKSRWQEGNVFSCSVMHEALHNHYTQKSLSLSPGK

SEQ ID NO: 1113 - protein, 407 aa, Artificial Sequence
  Description of Artificial Sequence: Synthetic polypeptide
MTSKQSTIALALLPLLFTPVTKAQLGGSEEEVQIIQPDKSVSVAAGESAILHCTITSLFPVGPIQWFRGAGPARVLIYNQRQGPFPRVTTISETTRRENMDFSISISNITPADAGTYYCIKFRKGSPDTEFKSGAGTELSVRAKPSASAAAPPCPPCPAPEFLGGPSVFLFPPKPKDTLMISRTPEVTCVVVDVSQEDPEVQFNWYVDGVEVHNAKTKPREEQFNSTYRVVSVLTVLHQDWLNGKEYKCKVSNKGLPSSIEKTISKAKGQPREPQVYTLPPSQEEMTKNQVSLTCLVKGFYPSDIAVEWESNGQPENNYKTTPPVLDSDGSFFLYSRLTVDKSRWQEGNVFSCSVMHEALHNHYTQKSLSLSPGKGSGELGGSGGKPIPNPLLGLDSTGSGHHHHHH

SEQ ID NO: 1114 - protein, 375 aa, Artificial Sequence
  Description of Artificial Sequence: Synthetic polypeptide
MTSKQSTIALALLPLLFTPVTKAQLGGSEEEVQIIQPDKSVSVAAGESAILHCTITSLFPVGPIQWFRGAGPARVLIYNQRQGPFPRVTTISETTRRENMDFSISISNITPADAGTYYCIKFRKGSPDTEFKSGAGTELSVRAKPSASAAAPPCPPCPAPEFLGGPSVFLFPPKPKDTLMISRTPEVTCVVVDVSQEDPEVQFNWYVDGVEVHNAKTKPREEQFNSTYRVVSVLTVLHQDWLNGKEYKCKVSNKGLPSSIEKTISKAKGQPREPQVYTLPPSQEEMTKNQVSLTCLVKGFYPSDIAVEWESNGQPENNYKTTPPVLDSDGSFFLYSRLTVDKSRWQEGNVFSCSVMHEALHNHYTQKSLSLSPGK

SEQ ID NO: 1115 - protein, 347 aa, Artificial Sequence
  Description of Artificial Sequence: Synthetic polypeptide
EEEVQIIQPDKSVSVAAGESAILHCTITSLFPVGPIQWFRGAGPARVLIYNQRQGPFPRVTTISETTRRENMDFSISISNITPADAGTYYCIKFRKGSPDTEFKSGAGTELSVRAKPSASAAAPPCPPCPAPEFLGGPSVFLFPPKPKDTLMISRTPEVTCVVVDVSQEDPEVQFNWYVDGVEVHNAKTKPREEQFNSTYRVVSVLTVLHQDWLNGKEYKCKVSNKGLPSSIEKTISKAKGQPREPQVYTLPPSQEEMTKNQVSLTCLVKGFYPSDIAVEWESNGQPENNYKTTPPVLDSDGSFFLYSRLTVDKSRWQEGNVFSCSVMHEALHNHYTQKSLSLSPGK

SEQ ID NO: 1116 - protein, 118 aa, Artificial Sequence
  Description of Artificial Sequence: Synthetic polypeptide
EEEVQIIQPDKSVSVAAGESAILHCTITSLFPVGPIQWFRGAGPARVLIYNQRQGPFPRVTTISETTRRENMDFSISISNITPADAGTYYCIKFRKGSPDTEFKSGAGTELSVRAKPS

SEQ ID NO: 1117 - protein, 227 aa, Artificial Sequence
  Description of Artificial Sequence: Synthetic polypeptide
AAAPPCPPCPAPEFLGGPSVFLFPPKPKDTLMISRTPEVTCVVVDVSQEDPEVQFNWYVDGVEVHNAKTKPREEQFNSTYRVVSVLTVLHQDWLNGKEYKCKVSNKGLPSSIEKTISKAKGQPREPQVYTLPPSQEEMTKNQVSLTCLVKGFYPSDIAVEWESNGQPENNYKTTPPVLDSDGSFFLYSRLTVDKSRWQEGNVFSCSVMHEALHNHYTQKSLSLSPGK

SEQ ID NO: 1118 - protein, 307 aa, Artificial Sequence
  Description of Artificial Sequence: Synthetic polypeptide
MTSKQSTIALALLPLLFTPVTKAQLGGSQVKLLQSGAALVKPGASVKMSCQASGYSFTDYWVTWVKQSHGQSLEWIGEIYPSNTVTNFNDNFKGKATLTVDKSTSTAYMELSRLTSEDSAIYYCTRIGNSGYRVGWFIYWGQGTLVTVLSGGGGSGGGGSGGGGSDTVLTQSPALAVSPGERVTISCKASESVSSHMHWYQQKPGQQPKLLIYKASNLASGVPARFSGSGSGTDFTLTIDPVEADDTATYFCQQGWNGPFTFGAGTRLELKRADAAGSGELGGSGKPIPNPLLGLDSTGSGHHHHHH

SEQ ID NO: 1119 - protein, 21 aa, Homo sapiens
IVVGVVCTLLVALLMAALYLV

SEQ ID NO: 1120 - protein, 110 aa, Homo sapiens
RIRQKKAQGSTSSTRLHEPEKNAREITQDTNDITYADLNLPKGKKPAPQAAEPNNHTEYASIQTSPQPASEDTLTYADLDMVHLNRTPKQPAPKPEPSFSEYASVQVPRK

SEQ ID NO: 1121 - protein, 16 aa, Artificial Sequence
  Description of Artificial Sequence: Synthetic peptide
SGGGGSGGGGSGGGGS

SEQ ID NO: 1122 - DNA, 1452 bp, Artificial Sequence
  Description of Artificial Sequence: Synthetic polynucleotide
atgactagtaaacaatcgaccatcgcattggcgctgcttcctctattgttcacaccggtgacaaaggcagtcgactataaggatgacgacgacaagcaattgggcggtggctttcgtgggccattgttacccaaccgtccattcaccactgtctggaacgccaatacacaatggtgtttggagcgtcatggagtcgatgtagatgtatccgtgtttgatgtcgtggcgaacccgggacagacatttcgtggaccggacatgaccatcttttattcgtcacaacttggcacctacccttattacactcccacgggtgagcctgtctttggtggacttcctcaaaatgcttctttgattgcgcacttggcgcgtactttccaagatatcctggctgccatccctgccccggatttttcgggactggctgtaattgattgggaggcatggcgccctcgttgggccttcaactgggatacaaaggacatttaccgccaacgcagccgcgccttggttcaggcccaacaccccgactggccggcgccccaggtggaagcagttgcacaggaccagttccaaggagccgctcgcgcttggatggcgggtactttacagttggggcgcgctttgcgtcctcgcggcttgtggggattctatggttttccagactgctataactacgacttcttgtctcccaactacaccggacagtgtccctctgggattcgtgctcagaatgaccaacttggatggctgtggggccaaagtcgtgcgctgtatccgagcatttatatgccagccgttctggaaggaacaggcaagtctcagatgtacgttcaacatcgtgtagcggaagcctttcgtgtagccgtggcggcaggtgacccaaatttgccggtcttaccttacgtacagattttttatgacactacaaatcacttccttccactggatgagttagaacattcattgggggagtcagcagctcagggcgcggctggggtggtgttgtgggtgagctgggaaaacacgcgtacgaaagagtcatgccaggctatcaaggaatacatggatacaactcttggtccgtttattttgaatgtgacttctggggcgcttttgtgttcccaggctctttgctcaggtcatgggcgttgcgttcgccgtacctcgcatccgaaagcgcttctgcttctgaacccagcgtcattcagcattcaactgacacctggagggggtcctttatcactgcgcggggctttatctttggaagaccaagctcagatggcggtcgagttcaagtgtcgctgctacccaggttggcaggccccgtggtgcgagcgtaaaagtatgtggaagggcgagctcaattcgaagcttgaaggtaagcctatccctaaccctctcctcggcctcgattctacgcgtaccggtcatcatcaccatcaccattga

SEQ ID NO: 1123 - DNA, 1353 bp, Artificial Sequence
  Description of Artificial Sequence: Synthetic polynucleotide
atgactagtaaacaatcgaccatcgcattggcgctgcttcctctattgttcacaccggtgacaaaggcagtcgactataaggatgacgacgacaagcaattgggcggtggctttcgtgggccattgttacccaaccgtccattcaccactgtctggaacgccaatacacaatggtgtttggagcgtcatggagtcgatgtagatgtatccgtgtttgatgtcgtggcgaacccgggacagacatttcgtggaccggacatgaccatcttttattcgtcacaacttggcacctacccttattacactcccacgggtgagcctgtctttggtggacttcctcaaaatgcttctttgattgcgcacttggcgcgtactttccaagatatcctggctgccatccctgccccggatttttcgggactggctgtaattgattgggaggcatggcgccctcgttgggccttcaactgggatacaaaggacatttaccgccaacgcagccgcgccttggttcaggcccaacaccccgactggccggcgccccaggtggaagcagttgcacaggaccagttccaaggagccgctcgcgcttggatggcgggtactttacagttggggcgcgctttgcgtcctcgcggcttgtggggattctatggttttccagactgctataactacgacttcttgtctcccaactacaccggacagtgtccctctgggattcgtgctcagaatgaccaacttggatggctgtggggccaaagtcgtgcgctgtatccgagcatttatatgccagccgttctggaaggaacaggcaagtctcagatgtacgttcaacatcgtgtagcggaagcctttcgtgtagccgtggcggcaggtgacccaaatttgccggtcttaccttacgtacagattttttatgacactacaaatcacttccttccactggatgagttagaacattcattgggggagtcagcagctcagggcgcggctggggtggtgttgtgggtgagctgggaaaacacgcgtacgaaagagtcatgccaggctatcaaggaatacatggatacaactcttggtccgtttattttgaatgtgacttctggggcgcttttgtgttcccaggctctttgctcaggtcatgggcgttgcgttcgccgtacctcgcatccgaaagcgcttctgcttctgaacccagcgtcattcagcattcaactgacacctggagggggtcctttatcactgcgcggggctttatctttggaagaccaagctcagatggcggtcgagttcaagtgtcgctgctacccaggttggcaggccccgtggtgcgagcgtaaaagtatgtgg

SEQ ID NO: 1124 - DNA, 1440 bp, Artificial Sequence
  Description of Artificial Sequence: Synthetic polynucleotide
atgactagtaaacaatcgaccatcgcattggcgctgcttcctctattgttcacaccggtgacaaaggcagtcgactataaggatgacgacgacaagcaattgggcggtggctctgttgttagcaaccgtccctttatcactgtgtggaacggtgacacacattggtgtttaaccgagtacggggtcgatgtggacgtttcggtctttgacgtcgtggctaataaagagcaatctttccaaggctctaatatgaccatcttctatcgtgaagagcttggcacatacccatactacaccccaactggcgagccagtctttggggggcttccgcaaaatgcctctttggtgactcatctggcgcataccttccaagatatcaaagcggcgatgcccgaaccagatttttccgggttagcggtaatcgactgggaggcatggcgtcctcgctgggcttttaactgggatagtaaagatatttatcgccaacgttctatggaacttgtgcaagcagaacatcctgattggcctgagaccctggtggaggcagctgctaaaaatcagttccaggaggcagcagaagcgtggatggccggaacgctgcagttggggcaagtgttgcgcccgcgcggactttggggctattatggattccccgactgttataacaatgacttcctttcgttaaattacaccggccaatgtcccgtgttcgttcgtgatcagaatgatcagttgggatggttgtggaaccagtcatacgccctttatccatccatctatttacccgccgctttaatgggcacggagaaatctcagatgtatgttcgccaccgtgttcaggaagcattgcgtgttgctattgtttcccgtgacccccacgttccggtcatgccatacgtccaaatcttttacgaaatgaccgactatttgttaccgttagaagagcttgaacacagtttgggggagtcagctgcacaaggtgtagcgggagcagtgctttggttgagttcagacaaaacgtctactaaagaatcatgtcaagcaattaaagcatacatggattccaccttgggtccgtttatcgtgaacgtcacatcggcggcattgttatgctcagaagccctttgctcggggcatggccgctgtgttcgtcatccaagctaccccgaggctctgttgacattgaatcctgcaagtttttcgatcgaactgacacatgacgggcgcccacccagtcttaaaggcaccctttcattgaaagatcgtgctcagatggcgatgaaattccgctgtcgttgctatcgtggttggcgcggcaagtggtgcgataaacgtggtatgaagggcgagctcaattcgaagcttgaaggtaagcctatccctaaccctctcctcggcctcgattctacgcgtaccggtcatcatcaccatcaccattga

SEQ ID NO: 1125 - DNA, 1580 bp, Artificial Sequence
  Description of Artificial Sequence: Synthetic polynucleotide
atgaaacaatcgaccatcgcattggcgctgcttcctctattgttcacaccggtgacaaaggcacaattgggcggtggcatgaaagagattgctgttaccatcgacgataaaaacgtgattgcttcagtcagtgaaagctttcacggcgtcgctttcgacgcttccctgttttctccgaaaggcctgtggagttttgttgacattacgtcacccaagctgtttaaactgcttgagggcctgtctccaggttactttcgcgttggcgggacattcgcgaactggttattcttcgacttagacgagaacaacaagtggaaggattactgggcttttaaagacaaaactcctgagacagccacaattacgcgccgttggttgtttcgcaagcaaaacaatttaaagaaggagacgttcgatgatcttgtcaagctgactaaaggatcaaagatgcgtcttttgtttgacctgaatgcagaagttcgcacagggtacgaaattggcaaaaagatgaccagcacttgggattcatctgaagctgaaaagctgttcaagtactgtgttagcaagggttacggagacaatattgactgggagcttggtaacgaacccgaccacacaagcgcacataacttaactgagaagcaggtgggtgaagatttcaaggcgctgcataaagttttggagaagtatccaaccttaaataaaggatcgttggtagggcctgacgtagggtggatgggggtatcatacgttaaaggtctggccgatggtgcaggtgaccatgtgacagcttttacgttacatcaatactacttcgatggtaacacgtcggatgtgtcaacttacttggacgctacctactttaaaaagttacaacagctgttcgataaggtaaaagacgtcttgaaaaattccccacataaagacaaacccctttggcttggcgaaactagctcgggttacaacagcggaacgaaagatgtgtctgaccgttatgtgtcagggttcttgacacttgataaattgggccttagcgccgctaacaacgtgaaggtcgtcattcgccagactatctataatggttactatggcttgttagacaaaaacacccttgagcctaacccggactattggttgatgcatgtacataactcgctggtagggaacactgtgttcaaggttgacgtgtctgatcctactaacaaggcccgtgtttacgcgcagtgtaccaaaactaatagcaaacatacacaatctcgctactacaaaggttcccttaccatttttgctttgaatgtcggcgacgaggatgtgaccttaaagattgaccaatattctgggaagaaaatttattcatatattctgactccagaggggggtcaactgaccagccaaaaagtacttttgaatggcaaggagttgaaactggtgagcgatcagcttccagagctgaacgcggatgagtccaaaacatcatttacattatctcctaagacgttcgggtttttcgtcgtgagtgacgctaatgtagaagcatgtaagaaaggatccggtcatcaccaccatcaccatcaccatta

SEQ ID NO: 1126 - DNA, 1545 bp, Artificial Sequence
  Description of Artificial Sequence: Synthetic polynucleotide
atgaaacaatcgaccatcgcattggcgctgcttcctctattgttcacaccggtgacaaaggcacaattgggcggtggcatgaaagagattgctgttaccatcgacgataaaaacgtgattgcttcagtcagtgaaagctttcacggcgtcgctttcgacgcttccctgttttctccgaaaggcctgtggagttttgttgacattacgtcacccaagctgtttaaactgcttgagggcctgtctccaggttactttcgcgttggcgggacattcgcgaactggttattcttcgacttagacgagaacaacaagtggaaggattactgggcttttaaagacaaaactcctgagacagccacaattacgcgccgttggttgtttcgcaagcaaaacaatttaaagaaggagacgttcgatgatcttgtcaagctgactaaaggatcaaagatgcgtcttttgtttgacctgaatgcagaagttcgcacagggtacgaaattggcaaaaagatgaccagcacttgggattcatctgaagctgaaaagctgttcaagtactgtgttagcaagggttacggagacaatattgactgggagcttggtaacgaacccgaccacacaagcgcacataacttaactgagaagcaggtgggtgaagatttcaaggcgctgcataaagttttggagaagtatccaaccttaaataaaggatcgttggtagggcctgacgtagggtggatgggggtatcatacgttaaaggtctggccgatggtgcaggtgaccatgtgacagcttttacgttacatcaatactacttcgatggtaacacgtcggatgtgtcaacttacttggacgctacctactttaaaaagttacaacagctgttcgataaggtaaaagacgtcttgaaaaattccccacataaagacaaacccctttggcttggcgaaactagctcgggttacaacagcggaacgaaagatgtgtctgaccgttatgtgtcagggttcttgacacttgataaattgggccttagcgccgctaacaacgtgaaggtcgtcattcgccagactatctataatggttactatggcttgttagacaaaaacacccttgagcctaacccggactattggttgatgcatgtacataactcgctggtagggaacactgtgttcaaggttgacgtgtctgatcctactaacaaggcccgtgtttacgcgcagtgtaccaaaactaatagcaaacatacacaatctcgctactacaaaggttcccttaccatttttgctttgaatgtcggcgacgaggatgtgaccttaaagattgaccaatattctgggaagaaaatttattcatatattctgactccagaggggggtcaactgaccagccaaaaagtacttttgaatggcaaggagttgaaactggtgagcgatcagcttccagagctgaacgcggatgagtccaaaacatcatttacattatctcctaagacgttcgggtttttcgtcgtgagtgacgctaatgtagaagcatgtaagaaa

SEQ ID NO: 1127 - protein, 483 aa, Artificial Sequence
  Description of Artificial Sequence: Synthetic polypeptide
MTSKQSTIALALLPLLFTPVTKAVDYKDDDDKQLGGGFRGPLLPNRPFTTVWNANTQWCLERHGVDVDVSVFDVVANPGQTFRGPDMTIFYSSQLGTYPYYTPTGEPVFGGLPQNASLIAHLARTFQDILAAIPAPDFSGLAVIDWEAWRPRWAFNWDTKDIYRQRSRALVQAQHPDWPAPQVEAVAQDQFQGAARAWMAGTLQLGRALRPRGLWGFYGFPDCYNYDFLSPNYTGQCPSGIRAQNDQLGWLWGQSRALYPSIYMPAVLEGTGKSQMYVQHRVAEAFRVAVAAGDPNLPVLPYVQIFYDTTNHFLPLDELEHSLGESAAQGAAGVVLWVSWENTRTKESCQAIKEYMDTTLGPFILNVTSGALLCSQALCSGHGRCVRRTSHPKALLLLNPASFSIQLTPGGGPLSLRGALSLEDQAQMAVEFKCRCYPGWQAPWCERKSMWKGELNSKLEGKPIPNPLLGLDSTRTGHHHHHH

SEQ ID NO: 1128 - protein, 414 aa, Artificial Sequence
  Description of Artificial Sequence: Synthetic polypeptide
FRGPLLPNRPFTTVWNANTQWCLERHGVDVDVSVFDVVANPGQTFRGPDMTIFYSSQLGTYPYYTPTGEPVFGGLPQNASLIAHLARTFQDILAAIPAPDFSGLAVIDWEAWRPRWAFNWDTKDIYRQRSRALVQAQHPDWPAPQVEAVAQDQFQGAARAWMAGTLQLGRALRPRGLWGFYGFPDCYNYDFLSPNYTGQCPSGIRAQNDQLGWLWGQSRALYPSIYMPAVLEGTGKSQMYVQHRVAEAFRVAVAAGDPNLPVLPYVQIFYDTTNHFLPLDELEHSLGESAAQGAAGVVLWVSWENTRTKESCQAIKEYMDTTLGPFILNVTSGALLCSQALCSGHGRCVRRTSHPKALLLLNPASFSIQLTPGGGPLSLRGALSLEDQAQMAVEFKCRCYPGWQAPWCERKSMW

SEQ ID NO: 1129 - protein, 451 aa, Artificial Sequence
  Description of Artificial Sequence: Synthetic polypeptide
MTSKQSTIALALLPLLFTPVTKAVDYKDDDDKQLGGGFRGPLLPNRPFTTVWNANTQWCLERHGVDVDVSVFDVVANPGQTFRGPDMTIFYSSQLGTYPYYTPTGEPVFGGLPQNASLIAHLARTFQDILAAIPAPDFSGLAVIDWEAWRPRWAFNWDTKDIYRQRSRALVQAQHPDWPAPQVEAVAQDQFQGAARAWMAGTLQLGRALRPRGLWGFYGFPDCYNYDFLSPNYTGQCPSGIRAQNDQLGWLWGQSRALYPSIYMPAVLEGTGKSQMYVQHRVAEAFRVAVAAGDPNLPVLPYVQIFYDTTNHFLPLDELEHSLGESAAQGAAGVVLWVSWENTRTKESCQAIKEYMDTTLGPFILNVTSGALLCSQALCSGHGRCVRRTSHPKALLLLNPASFSIQLTPGGGPLSLRGALSLEDQAQMAVEFKCRCYPGWQAPWCERKSMW

SEQ ID NO: 1130 - protein, 499 aa, Artificial Sequence
  Description of Artificial Sequence: Synthetic polypeptide
MTSKQSTIALALLPLLFTPVTKAKQSTIALALLPLLFTPVTKAVDYKDDDDKDLGGGSVVSNRPFITVWNGDTHWCLTEYGVDVDVSVFDVVANKEQSFQGSNMTIFYREELGTYPYYTPTGEPVFGGLPQNASLVTHLAHTFQDIKAAMPEPDFSGLAVIDWEAWRPRWAFNWDSKDIYRQRSMELVQAEHPDWPETLVEAAAKNQFQEAAEAWMAGTLQLGQVLRPRGLWGYYGFPDCYNNDFLSLNYTGQCPVFVRDQNDQLGWLWNQSYALYPSIYLPAALMGTEKSQMYVRHRVQEALRVAIVSRDPHVPVMPYVQIFYEMTDYLLPLEELEHSLGESAAQGVAGAVLWLSSDKTSTKESCQAIKAYMDSTLGPFIVNVTSAALLCSEALCSGHGRCVRHPSYPEALLTLNPASFSIELTHDGRPPSLKGTLSLKDRAQMAMKFRCRCYRGWRGKWCDKRGMKGELNSKLEGKPIPNPLLGLDSTRTGHHHHHH

SEQ ID NO: 1131 - protein, 489 aa, Hirudo nipponia
MKEIAVTIDDKNVIASVSESFHGVAFDASLFSPKGLWSFVDITSPKLFKLLEGLSPGYFRVGGTFANWLFFDLDENNKWKDYWAFKDKTPETATITRRWLFRKQNNLKKETFDDLVKLTKGSKMRLLFDLNAEVRTGYEIGKKMTSTWDSSEAEKLFKYCVSKGYGDNIDWELGNEPDHTSAHNLTEKQVGEDFKALHKVLEKYPTLNKGSLVGPDVGWMGVSYVKGLADGAGDHVTAFTLHQYYFDGNTSDVSTYLDATYFKKLQQLFDKVKDVLKNSPHKDKPLWLGETSSGYNSGTKDVSDRYVSGFLTLDKLGLSAANNVKVVIRQTIYNGYYGLLDKNTLEPNPDYWLMHVHNSLVGNTVFKVDVSDPTNKARVYAQCTKTNSKHTQSRYYKGSLTIFALNVGDEDVTLKIDQYSGKKIYSYILTPEGGQLTSQKVLLNGKELKLVSDQLPELNADESKTSFTLSPKTFGFFVVSDANVEACKK

SEQ ID NO: 1132 - protein, 78 aa, Homo sapiens
ITCPPPMSVEHADIWVKSYSLYSRERYICNSGFKRKAGTSSLTECVLNKATNVAHWTTPSLKCIRDPALVHQRPAPPS

SEQ ID NO: 1133 - protein, 248 aa, Artificial Sequence
  Description of Artificial Sequence: Synthetic polypeptide
MFKSTLAAMAAVFALSALSPAAMADYKDDDDKIEGRITCPPPMSVEHADIWVKSYSLYSRERYICNSGFKRKAGTSSLTECVLNKATNVAHWTTPSLKCIRDPALVHQRPAPPSSGGSGGGGSGGGSGGGGSLQNWVNVISDLKKIEDLIQSMHIDATLYTESDVHPSCKVTAMKCFLLELQVISLESGDASIHDTVENLIILANDSLSSNGNVTESGCKECEELEEKNIKEFLQSFVHIVQMFINTS

SEQ ID NO: 1134 - protein, 212 aa, Artificial Sequence
  Description of Artificial Sequence: Synthetic polypeptide
ITCPPPMSVEHADIWVKSYSLYSRERYICNSGFKRKAGTSSLTECVLNKATNVAHWTTPSLKCIRDPALVHQRPAPPSSGGSGGGGSGGGSGGGGSLQNWVNVISDLKKIEDLIQSMHIDATLYTESDVHPSCKVTAMKCFLLELQVISLESGDASIHDTVENLIILANDSLSSNGNVTESGCKECEELEEKNIKEFLQSFVHIVQMFINTS

SEQ ID NO: 1135 - protein, 24 aa, Artificial Sequence
  Description of Artificial Sequence: Synthetic peptide
MFKSTLAAMAAVFALSALSPAAMA

SEQ ID NO: 1136 - protein, 114 aa, Homo sapiens
NWVNVISDLKKIEDLIQSMHIDATLYTESDVHPSCKVTAMKCFLLELQVISLESGDASIHDTVENLIILANDSLSSNGNVTESGCKECEELEEKNIKEFLQSFVHIVQMFINTS

SEQ ID NO: 1137 - protein, 20 aa, Artificial Sequence
  Description of Artificial Sequence: Synthetic peptide
SGGSGGGGSGGGSGGGGSLQ

SEQ ID NO: 1138 - DNA, 234 bp, Artificial Sequence
  Description of Artificial Sequence: Synthetic polynucleotide
atcacctgcccgcctccaatgtctgttgagcacgcagatatttgggtaaaatcttactctttatattcccgtgaacgctatatctgtaatagtggcttcaagcgcaaggcaggcacatcctcactgacggagtgtgttttaaacaaagcaacaaacgtcgctcactggacgacgcccagcctgaagtgcatccgcgacccggcattggtccatcaacgtccagcccctccctca

SEQ ID NO: 1139 - DNA, 747 bp, Artificial Sequence
  Description of Artificial Sequence: Synthetic polynucleotide
atgtttaagtctacacttgcagccatggccgcagtcttcgcactgtcagccttgagtcctgctgcaatggcagattataaagacgatgacgataagatcgaaggacgtatcacctgcccgcctccaatgtctgttgagcacgcagatatttgggtaaaatcttactctttatattcccgtgaacgctatatctgtaatagtggcttcaagcgcaaggcaggcacatcctcactgacggagtgtgttttaaacaaagcaacaaacgtcgctcactggacgacgcccagcctgaagtgcatccgcgacccggcattggtccatcaacgtccagcccctccctcatccggagggagcggcggcgggggtagtggaggcgggtcaggcggcgggggctcacttcagaactgggtgaatgtcatctcggacttaaagaagattgaagacttgattcagagcatgcatatcgacgcgactttatacaccgagtctgacgtacacccaagttgcaaggtcaccgccatgaagtgcttcttgcttgagttacaagtcatcagtttggaatctggagacgctagtattcacgatacggtggaaaacctgatcatccttgcaaatgactctctttcatccaatggtaatgttactgagtcggggtgcaaagaatgtgaagaacttgaggagaagaacattaaggaatttcttcagtcattcgtgcatatcgtacagatgttcatcaacacctcttaa

SEQ ID NO: 1140 - DNA, 639 bp, Artificial Sequence
  Description of Artificial Sequence: Synthetic polynucleotide
atcacctgcccgcctccaatgtctgttgagcacgcagatatttgggtaaaatcttactctttatattcccgtgaacgctatatctgtaatagtggcttcaagcgcaaggcaggcacatcctcactgacggagtgtgttttaaacaaagcaacaaacgtcgctcactggacgacgcccagcctgaagtgcatccgcgacccggcattggtccatcaacgtccagcccctccctcatccggagggagcggcggcgggggtagtggaggcgggtcaggcggcgggggctcacttcagaactgggtgaatgtcatctcggacttaaagaagattgaagacttgattcagagcatgcatatcgacgcgactttatacaccgagtctgacgtacacccaagttgcaaggtcaccgccatgaagtgcttcttgcttgagttacaagtcatcagtttggaatctggagacgctagtattcacgatacggtggaaaacctgatcatccttgcaaatgactctctttcatccaatggtaatgttactgagtcggggtgcaaagaatgtgaagaacttgaggagaagaacattaaggaatttcttcagtcattcgtgcatatcgtacagatgttcatcaacacctcttaa

SEQ ID NO: 1141 - DNA, 72 bp, Artificial Sequence
  Description of Artificial Sequence: Synthetic oligonucleotide
atgtttaagtctacacttgcagccatggccgcagtcttcgcactgtcagccttgagtcctgctgcaatggca

SEQ ID NO: 1142 - DNA, 63 bp, Artificial Sequence
  Description of Artificial Sequence: Synthetic oligonucleotide
atgaagcaggcgcttcgcgttgcgtttgggttccttatcctgtgggcatccgtacttcacgcc

SEQ ID NO: 1143 - DNA, 54 bp, Artificial Sequence
  Description of Artificial Sequence: Synthetic oligonucleotide
atgcgcgtactgttattccttctgttgtctctttttatgttgcccgctttcagt

SEQ ID NO: 1144 - DNA, 63 bp, Artificial Sequence
  Description of Artificial Sequence: Synthetic oligonucleotide
atgaagaagactgccatcgctattgccgtcgcccttgcgggtttcgcaaccgtggcgcaagca

SEQ ID NO: 1145 - DNA, 66 bp, Artificial Sequence
  Description of Artificial Sequence: Synthetic oligonucleotide
atgaaatatctgcttccaacggctgctgctggcctgttgcttcttgccgcccagcctgcgatggct

SEQ ID NO: 1146 - DNA, 1749 bp, Artificial Sequence
  Description of Artificial Sequence: Synthetic oligonucleotide
atgaaaaagatttggctggctcttgccggtttagtcctggcattcagcgcaagcgcggtcgactataaggatgacgacgacaagcaattgggcggtggcatctgggagcttaagaaggacgtgtatgtagtggagttagactggtatccagatgcccccggagagatggtggtcttaacatgtgacactccagaggaggacgggattacctggacacttgaccagtcaagcgaggtattgggttctggaaagacgcttactattcaagtcaaagaatttggggatgccgggcagtatacatgtcacaagggcggcgaagttctgtcgcactccttacttttgttacacaaaaaagaagacggcatttggtccacagacatccttaaggaccaaaaggagccgaagaataagacgtttctgcgctgtgaagcgaagaactatagtggtcgctttacttgctggtggttgacgaccatttccactgatttaaccttttcggtaaagagttctcgcgggagttccgacccacagggcgtgacttgtggcgcagccacactttcggcggaacgcgttcgtggggacaataaggaatacgaatattcggtcgagtgtcaggaagattcagcttgccctgccgctgaggagtcacttccgattgaagtgatggttgacgccgtgcacaaattaaagtatgaaaattacacgtcatctttctttatccgtgacattattaagcccgacccgccaaagaatctgcagcttaaacccctgaagaacagccgccaggtggaagtaagctgggaatatcctgacacctggtccactccgcattcgtatttctcgttgacgttttgtgttcaggtgcagggaaagagcaagcgcgaaaagaaggatcgcgtctttacagacaaaacgtccgcgacggttatttgtcgtaagaatgctagtatctctgttcgcgctcaggaccgttattactcatctagttggtcggagtgggcctcggttccctgctctgggggtggaggatcgggtggaggtggctcgggaggtggcggctcccgtaatttaccggtggctactcctgacccagggatgttcccgtgcttgcaccatagccaaaacttacttcgcgctgtcagcaacatgcttcagaaagcacgtcaaacgcttgagttttacccgtgtactagcgaagagatcgatcacgaggacattaccaaagacaaaacctccaccgtcgaggcctgccttccacttgaactgacgaaaaatgagtcatgcttaaattctcgtgaaacctccttcattactaacggatcgtgcctggcctcgcgcaagacttcgttcatgatggcattatgcttgtcgtctatttatgaagaccttaaaatgtatcaagtggagttcaagacgatgaatgcaaaacttcttatggacccgaagcgtcaaatcttcttagaccaaaacatgttggccgtgatcgatgaactgatgcaagccttgaattttaattcggaaactgtaccgcaaaaatcttctcttgaagaaccggatttctataagaccaaaattaaactttgtattttacttcacgctttccgcatccgtgcagtaactatcgaccgcgtaatgagttaccttaacgcctcgggtggcgagctcggtggcagtggtaagcctatccctaaccctctcctcggcctcgattctacgggatccggtcatcaccaccatcaccatcaccat

SEQ ID NO: 1147 - DNA, 1755 bp, Artificial Sequence
  Description of Artificial Sequence: Synthetic oligonucleotide
atgaaacagagcacaatcgctttagccttgctgcctcttcttttcacgcctgtcacgaaggcagtcgactataaggatgacgacgacaagcaattgggcggtggcatctgggagcttaagaaggacgtgtatgtagtggagttagactggtatccagatgcccccggagagatggtggtcttaacatgtgacactccagaggaggacgggattacctggacacttgaccagtcaagcgaggtattgggttctggaaagacgcttactattcaagtcaaagaatttggggatgccgggcagtatacatgtcacaagggcggcgaagttctgtcgcactccttacttttgttacacaaaaaagaagacggcatttggtccacagacatccttaaggaccaaaaggagccgaagaataagacgtttctgcgctgtgaagcgaagaactatagtggtcgctttacttgctggtggttgacgaccatttccactgatttaaccttttcggtaaagagttctcgcgggagttccgacccacagggcgtgacttgtggcgcagccacactttcggcggaacgcgttcgtggggacaataaggaatacgaatattcggtcgagtgtcaggaagattcagcttgccctgccgctgaggagtcacttccgattgaagtgatggttgacgccgtgcacaaattaaagtatgaaaattacacgtcatctttctttatccgtgacattattaagcccgacccgccaaagaatctgcagcttaaacccctgaagaacagccgccaggtggaagtaagctgggaatatcctgacacctggtccactccgcattcgtatttctcgttgacgttttgtgttcaggtgcagggaaagagcaagcgcgaaaagaaggatcgcgtctttacagacaaaacgtccgcgacggttatttgtcgtaagaatgctagtatctctgttcgcgctcaggaccgttattactcatctagttggtcggagtgggcctcggttccctgctctgggggtggaggatcgggtggaggtggctcgggaggtggcggctcccgtaatttaccggtggctactcctgacccagggatgttcccgtgcttgcaccatagccaaaacttacttcgcgctgtcagcaacatgcttcagaaagcacgtcaaacgcttgagttttacccgtgtactagcgaagagatcgatcacgaggacattaccaaagacaaaacctccaccgtcgaggcctgccttccacttgaactgacgaaaaatgagtcatgcttaaattctcgtgaaacctccttcattactaacggatcgtgcctggcctcgcgcaagacttcgttcatgatggcattatgcttgtcgtctatttatgaagaccttaaaatgtatcaagtggagttcaagacgatgaatgcaaaacttcttatggacccgaagcgtcaaatcttcttagaccaaaacatgttggccgtgatcgatgaactgatgcaagccttgaattttaattcggaaactgtaccgcaaaaatcttctcttgaagaaccggatttctataagaccaaaattaaactttgtattttacttcacgctttccgcatccgtgcagtaactatcgaccgcgtaatgagttaccttaacgcctcgggtggcgagctcggtggcagtggtaagcctatccctaaccctctcctcggcctcgattctacgggatccggtcatcaccaccatcaccatcaccat

SEQ ID NO: 1148 - DNA, 1755 bp, Artificial Sequence
  Description of Artificial Sequence: Synthetic polynucleotide
atgaagcaggctctgcgcgtggcatttgggttcctgatcttatgggcgtccgtcttacacgcagtcgactataaggatgacgacgacaagcaattgggcggtggcatctgggagcttaagaaggacgtgtatgtagtggagttagactggtatccagatgcccccggagagatggtggtcttaacatgtgacactccagaggaggacgggattacctggacacttgaccagtcaagcgaggtattgggttctggaaagacgcttactattcaagtcaaagaatttggggatgccgggcagtatacatgtcacaagggcggcgaagttctgtcgcactccttacttttgttacacaaaaaagaagacggcatttggtccacagacatccttaaggaccaaaaggagccgaagaataagacgtttctgcgctgtgaagcgaagaactatagtggtcgctttacttgctggtggttgacgaccatttccactgatttaaccttttcggtaaagagttctcgcgggagttccgacccacagggcgtgacttgtggcgcagccacactttcggcggaacgcgttcgtggggacaataaggaatacgaatattcggtcgagtgtcaggaagattcagcttgccctgccgctgaggagtcacttccgattgaagtgatggttgacgccgtgcacaaattaaagtatgaaaattacacgtcatctttctttatccgtgacattattaagcccgacccgccaaagaatctgcagcttaaacccctgaagaacagccgccaggtggaagtaagctgggaatatcctgacacctggtccactccgcattcgtatttctcgttgacgttttgtgttcaggtgcagggaaagagcaagcgcgaaaagaaggatcgcgtctttacagacaaaacgtccgcgacggttatttgtcgtaagaatgctagtatctctgttcgcgctcaggaccgttattactcatctagttggtcggagtgggcctcggttccctgctctgggggtggaggatcgggtggaggtggctcgggaggtggcggctcccgtaatttaccggtggctactcctgacccagggatgttcccgtgcttgcaccatagccaaaacttacttcgcgctgtcagcaacatgcttcagaaagcacgtcaaacgcttgagttttacccgtgtactagcgaagagatcgatcacgaggacattaccaaagacaaaacctccaccgtcgaggcctgccttccacttgaactgacgaaaaatgagtcatgcttaaattctcgtgaaacctccttcattactaacggatcgtgcctggcctcgcgcaagacttcgttcatgatggcattatgcttgtcgtctatttatgaagaccttaaaatgtatcaagtggagttcaagacgatgaatgcaaaacttcttatggacccgaagcgtcaaatcttcttagaccaaaacatgttggccgtgatcgatgaactgatgcaagccttgaattttaattcggaaactgtaccgcaaaaatcttctcttgaagaaccggatttctataagaccaaaattaaactttgtattttacttcacgctttccgcatccgtgcagtaactatcgaccgcgtaatgagttaccttaacgcctcgggtggcgagctcggtggcagtggtaagcctatccctaaccctctcctcggcctcgattctacgggatccggtcatcaccaccatcaccatcaccat

SEQ ID NO: 1149 - DNA, 1770 bp, Artificial Sequence
  Description of Artificial Sequence: Synthetic polynucleotide
atgaaaatcaagacgggggcacgcattcttgccttgagcgccttgacaacgatgatgttcagtgcaagtgcattagcggtcgactataaggatgacgacgacaagcaattgggcggtggcatctgggagcttaagaaggacgtgtatgtagtggagttagactggtatccagatgcccccggagagatggtggtcttaacatgtgacactccagaggaggacgggattacctggacacttgaccagtcaagcgaggtattgggttctggaaagacgcttactattcaagtcaaagaatttggggatgccgggcagtatacatgtcacaagggcggcgaagttctgtcgcactccttacttttgttacacaaaaaagaagacggcatttggtccacagacatccttaaggaccaaaaggagccgaagaataagacgtttctgcgctgtgaagcgaagaactatagtggtcgctttacttgctggtggttgacgaccatttccactgatttaaccttttcggtaaagagttctcgcgggagttccgacccacagggcgtgacttgtggcgcagccacactttcggcggaacgcgttcgtggggacaataaggaatacgaatattcggtcgagtgtcaggaagattcagcttgccctgccgctgaggagtcacttccgattgaagtgatggttgacgccgtgcacaaattaaagtatgaaaattacacgtcatctttctttatccgtgacattattaagcccgacccgccaaagaatctgcagcttaaacccctgaagaacagccgccaggtggaagtaagctgggaatatcctgacacctggtccactccgcattcgtatttctcgttgacgttttgtgttcaggtgcagggaaagagcaagcgcgaaaagaaggatcgcgtctttacagacaaaacgtccgcgacggttatttgtcgtaagaatgctagtatctctgttcgcgctcaggaccgttattactcatctagttggtcggagtgggcctcggttccctgctctgggggtggaggatcgggtggaggtggctcgggaggtggcggctcccgtaatttaccggtggctactcctgacccagggatgttcccgtgcttgcaccatagccaaaacttacttcgcgctgtcagcaacatgcttcagaaagcacgtcaaacgcttgagttttacccgtgtactagcgaagagatcgatcacgaggacattaccaaagacaaaacctccaccgtcgaggcctgccttccacttgaactgacgaaaaatgagtcatgcttaaattctcgtgaaacctccttcattactaacggatcgtgcctggcctcgcgcaagacttcgttcatgatggcattatgcttgtcgtctatttatgaagaccttaaaatgtatcaagtggagttcaagacgatgaatgcaaaacttcttatggacccgaagcgtcaaatcttcttagaccaaaacatgttggccgtgatcgatgaactgatgcaagccttgaattttaattcggaaactgtaccgcaaaaatcttctcttgaagaaccggatttctataagaccaaaattaaactttgtattttacttcacgctttccgcatccgtgcagtaactatcgaccgcgtaatgagttaccttaacgcctcgggtggcgagctcggtggcagtggtaagcctatccctaaccctctcctcggcctcgattctacgggatccggtcatcaccaccatcaccatcaccat

SEQ ID NO: 1150 - DNA, 1761 bp, Artificial Sequence
  Description of Artificial Sequence: Synthetic polynucleotide
atgaataagaaagtcttgacattgtcggcggtcatggcctcgatgttgttcggggcagcagcccacgcagtcgactataaggatgacgacgacaagcaattgggcggtggcatctgggagcttaagaaggacgtgtatgtagtggagttagactggtatccagatgcccccggagagatggtggtcttaacatgtgacactccagaggaggacgggattacctggacacttgaccagtcaagcgaggtattgggttctggaaagacgcttactattcaagtcaaagaatttggggatgccgggcagtatacatgtcacaagggcggcgaagttctgtcgcactccttacttttgttacacaaaaaagaagacggcatttggtccacagacatccttaaggaccaaaaggagccgaagaataagacgtttctgcgctgtgaagcgaagaactatagtggtcgctttacttgctggtggttgacgaccatttccactgatttaaccttttcggtaaagagttctcgcgggagttccgacccacagggcgtgacttgtggcgcagccacactttcggcggaacgcgttcgtggggacaataaggaatacgaatattcggtcgagtgtcaggaagattcagcttgccctgccgctgaggagtcacttccgattgaagtgatggttgacgccgtgcacaaattaaagtatgaaaattacacgtcatctttctttatccgtgacattattaagcccgacccgccaaagaatctgcagcttaaacccctgaagaacagccgccaggtggaagtaagctgggaatatcctgacacctggtccactccgcattcgtatttctcgttgacgttttgtgttcaggtgcagggaaagagcaagcgcgaaaagaaggatcgcgtctttacagacaaaacgtccgcgacggttatttgtcgtaagaatgctagtatctctgttcgcgctcaggaccgttattactcatctagttggtcggagtgggcctcggttccctgctctgggggtggaggatcgggtggaggtggctcgggaggtggcggctcccgtaatttaccggtggctactcctgacccagggatgttcccgtgcttgcaccatagccaaaacttacttcgcgctgtcagcaacatgcttcagaaagcacgtcaaacgcttgagttttacccgtgtactagcgaagagatcgatcacgaggacattaccaaagacaaaacctccaccgtcgaggcctgccttccacttgaactgacgaaaaatgagtcatgcttaaattctcgtgaaacctccttcattactaacggatcgtgcctggcctcgcgcaagacttcgttcatgatggcattatgcttgtcgtctatttatgaagaccttaaaatgtatcaagtggagttcaagacgatgaatgcaaaacttcttatggacccgaagcgtcaaatcttcttagaccaaaacatgttggccgtgatcgatgaactgatgcaagccttgaattttaattcggaaactgtaccgcaaaaatcttctcttgaagaaccggatttctataagaccaaaattaaactttgtattttacttcacgctttccgcatccgtgcagtaactatcgaccgcgtaatgagttaccttaacgcctcgggtggcgagctcggtggcagtggtaagcctatccctaaccctctcctcggcctcgattctacgggatccggtcatcaccaccatcaccatcaccat

SEQ ID NO: 1151 - DNA, 1758 bp, Artificial Sequence
  Description of Artificial Sequence: Synthetic polynucleotide
atgatgaagcgtaacatcttagccgttattgtccccgcattgcttgtggccgggacggctaacgcagtcgactataaggatgacgacgacaagcaattgggcggtggcatctgggagcttaagaaggacgtgtatgtagtggagttagactggtatccagatgcccccggagagatggtggtcttaacatgtgacactccagaggaggacgggattacctggacacttgaccagtcaagcgaggtattgggttctggaaagacgcttactattcaagtcaaagaatttggggatgccgggcagtatacatgtcacaagggcggcgaagttctgtcgcactccttacttttgttacacaaaaaagaagacggcatttggtccacagacatccttaaggaccaaaaggagccgaagaataagacgtttctgcgctgtgaagcgaagaactatagtggtcgctttacttgctggtggttgacgaccatttccactgatttaaccttttcggtaaagagttctcgcgggagttccgacccacagggcgtgacttgtggcgcagccacactttcggcggaacgcgttcgtggggacaataaggaatacgaatattcggtcgagtgtcaggaagattcagcttgccctgccgctgaggagtcacttccgattgaagtgatggttgacgccgtgcacaaattaaagtatgaaaattacacgtcatctttctttatccgtgacattattaagcccgacccgccaaagaatctgcagcttaaacccctgaagaacagccgccaggtggaagtaagctgggaatatcctgacacctggtccactccgcattcgtatttctcgttgacgttttgtgttcaggtgcagggaaagagcaagcgcgaaaagaaggatcgcgtctttacagacaaaacgtccgcgacggttatttgtcgtaagaatgctagtatctctgttcgcgctcaggaccgttattactcatctagttggtcggagtgggcctcggttccctgctctgggggtggaggatcgggtggaggtggctcgggaggtggcggctcccgtaatttaccggtggctactcctgacccagggatgttcccgtgcttgcaccatagccaaaacttacttcgcgctgtcagcaacatgcttcagaaagcacgtcaaacgcttgagttttacccgtgtactagcgaagagatcgatcacgaggacattaccaaagacaaaacctccaccgtcgaggcctgccttccacttgaactgacgaaaaatgagtcatgcttaaattctcgtgaaacctccttcattactaacggatcgtgcctggcctcgcgcaagacttcgttcatgatggcattatgcttgtcgtctatttatgaagaccttaaaatgtatcaagtggagttcaagacgatgaatgcaaaacttcttatggacccgaagcgtcaaatcttcttagaccaaaacatgttggccgtgatcgatgaactgatgcaagccttgaattttaattcggaaactgtaccgcaaaaatcttctcttgaagaaccggatttctataagaccaaaattaaactttgtattttacttcacgctttccgcatccgtgcagtaactatcgaccgcgtaatgagttaccttaacgcctcgggtggcgagctcggtggcagtggtaagcctatccctaaccctctcctcggcctcgattctacgggatccggtcatcaccaccatcaccatcaccat

SEQ ID NO: 1152 - DNA, 1755 bp, Artificial Sequence
  Description of Artificial Sequence: Synthetic polynucleotide
atgaagaagactgccatcgctattgccgtcgcccttgcgggtttcgcaaccgtggcgcaagcagtcgactataaggatgacgacgacaagcaattgggcggtggcatctgggagcttaagaaggacgtgtatgtagtggagttagactggtatccagatgcccccggagagatggtggtcttaacatgtgacactccagaggaggacgggattacctggacacttgaccagtcaagcgaggtattgggttctggaaagacgcttactattcaagtcaaagaatttggggatgccgggcagtatacatgtcacaagggcggcgaagttctgtcgcactccttacttttgttacacaaaaaagaagacggcatttggtccacagacatccttaaggaccaaaaggagccgaagaataagacgtttctgcgctgtgaagcgaagaactatagtggtcgctttacttgctggtggttgacgaccatttccactgatttaaccttttcggtaaagagttctcgcgggagttccgacccacagggcgtgacttgtggcgcagccacactttcggcggaacgcgttcgtggggacaataaggaatacgaatattcggtcgagtgtcaggaagattcagcttgccctgccgctgaggagtcacttccgattgaagtgatggttgacgccgtgcacaaattaaagtatgaaaattacacgtcatctttctttatccgtgacattattaagcccgacccgccaaagaatctgcagcttaaacccctgaagaacagccgccaggtggaagtaagctgggaatatcctgacacctggtccactccgcattcgtatttctcgttgacgttttgtgttcaggtgcagggaaagagcaagcgcgaaaagaaggatcgcgtctttacagacaaaacgtccgcgacggttatttgtcgtaagaatgctagtatctctgttcgcgctcaggaccgttattactcatctagttggtcggagtgggcctcggttccctgctctgggggtggaggatcgggtggaggtggctcgggaggtggcggctcccgtaatttaccggtggctactcctgacccagggatgttcccgtgcttgcaccatagccaaaacttacttcgcgctgtcagcaacatgcttcagaaagcacgtcaaacgcttgagttttacccgtgtactagcgaagagatcgatcacgaggacattaccaaagacaaaacctccaccgtcgaggcctgccttccacttgaactgacgaaaaatgagtcatgcttaaattctcgtgaaacctccttcattactaacggatcgtgcctggcctcgcgcaagacttcgttcatgatggcattatgcttgtcgtctatttatgaagaccttaaaatgtatcaagtggagttcaagacgatgaatgcaaaacttcttatggacccgaagcgtcaaatcttcttagaccaaaacatgttggccgtgatcgatgaactgatgcaagccttgaattttaattcggaaactgtaccgcaaaaatcttctcttgaagaaccggatttctataagaccaaaattaaactttgtattttacttcacgctttccgcatccgtgcagtaactatcgaccgcgtaatgagttaccttaacgcctcgggtggcgagctcggtggcagtggtaagcctatccctaaccctctcctcggcctcgattctacgggatccggtcatcaccaccatcaccatcaccat

SEQ ID NO: 1153 - DNA, 1746 bp, Artificial Sequence
  Description of Artificial Sequence: Synthetic polynucleotide
atgcgcgtgttattgttcttgctgctgagcttgtttatgttaccagctttcagtgtcgactataaggatgacgacgacaagcaattgggcggtggcatctgggagcttaagaaggacgtgtatgtagtggagttagactggtatccagatgcccccggagagatggtggtcttaacatgtgacactccagaggaggacgggattacctggacacttgaccagtcaagcgaggtattgggttctggaaagacgcttactattcaagtcaaagaatttggggatgccgggcagtatacatgtcacaagggcggcgaagttctgtcgcactccttacttttgttacacaaaaaagaagacggcatttggtccacagacatccttaaggaccaaaaggagccgaagaataagacgtttctgcgctgtgaagcgaagaactatagtggtcgctttacttgctggtggttgacgaccatttccactgatttaaccttttcggtaaagagttctcgcgggagttccgacccacagggcgtgacttgtggcgcagccacactttcggcggaacgcgttcgtggggacaataaggaatacgaatattcggtcgagtgtcaggaagattcagcttgccctgccgctgaggagtcacttccgattgaagtgatggttgacgccgtgcacaaattaaagtatgaaaattacacgtcatctttctttatccgtgacattattaagcccgacccgccaaagaatctgcagcttaaacccctgaagaacagccgccaggtggaagtaagctgggaatatcctgacacctggtccactccgcattcgtatttctcgttgacgttttgtgttcaggtgcagggaaagagcaagcgcgaaaagaaggatcgcgtctttacagacaaaacgtccgcgacggttatttgtcgtaagaatgctagtatctctgttcgcgctcaggaccgttattactcatctagttggtcggagtgggcctcggttccctgctctgggggtggaggatcgggtggaggtggctcgggaggtggcggctcccgtaatttaccggtggctactcctgacccagggatgttcccgtgcttgcaccatagccaaaacttacttcgcgctgtcagcaacatgcttcagaaagcacgtcaaacgcttgagttttacccgtgtactagcgaagagatcgatcacgaggacattaccaaagacaaaacctccaccgtcgaggcctgccttccacttgaactgacgaaaaatgagtcatgcttaaattctcgtgaaacctccttcattactaacggatcgtgcctggcctcgcgcaagacttcgttcatgatggcattatgcttgtcgtctatttatgaagaccttaaaatgtatcaagtggagttcaagacgatgaatgcaaaacttcttatggacccgaagcgtcaaatcttcttagaccaaaacatgttggccgtgatcgatgaactgatgcaagccttgaattttaattcggaaactgtaccgcaaaaatcttctcttgaagaaccggatttctataagaccaaaattaaactttgtattttacttcacgctttccgcatccgtgcagtaactatcgaccgcgtaatgagttaccttaacgcctcgggtggcgagctcggtggcagtggtaagcctatccctaaccctctcctcggcctcgattctacgggatccggtcatcaccaccatcaccatcaccat

SEQ ID NO: 1154 - DNA, 1767 bp, Artificial Sequence
  Description of Artificial Sequence: Synthetic polynucleotide
atgatgattaccttacgcaagttgccccttgcggtagccgttgctgctggtgtgatgtccgcgcaagcaatggctgtcgactataaggatgacgacgacaagcaattgggcggtggcatctgggagcttaagaaggacgtgtatgtagtggagttagactggtatccagatgcccccggagagatggtggtcttaacatgtgacactccagaggaggacgggattacctggacacttgaccagtcaagcgaggtattgggttctggaaagacgcttactattcaagtcaaagaatttggggatgccgggcagtatacatgtcacaagggcggcgaagttctgtcgcactccttacttttgttacacaaaaaagaagacggcatttggtccacagacatccttaaggaccaaaaggagccgaagaataagacgtttctgcgctgtgaagcgaagaactatagtggtcgctttacttgctggtggttgacgaccatttccactgatttaaccttttcggtaaagagttctcgcgggagttccgacccacagggcgtgacttgtggcgcagccacactttcggcggaacgcgttcgtggggacaataaggaatacgaatattcggtcgagtgtcaggaagattcagcttgccctgccgctgaggagtcacttccgattgaagtgatggttgacgccgtgcacaaattaaagtatgaaaattacacgtcatctttctttatccgtgacattattaagcccgacccgccaaagaatctgcagcttaaacccctgaagaacagccgccaggtggaagtaagctgggaatatcctgacacctggtccactccgcattcgtatttctcgttgacgttttgtgttcaggtgcagggaaagagcaagcgcgaaaagaaggatcgcgtctttacagacaaaacgtccgcgacggttatttgtcgtaagaatgctagtatctctgttcgcgctcaggaccgttattactcatctagttggtcggagtgggcctcggttccctgctctgggggtggaggatcgggtggaggtggctcgggaggtggcggctcccgtaatttaccggtggctactcctgacccagggatgttcccgtgcttgcaccatagccaaaacttacttcgcgctgtcagcaacatgcttcagaaagcacgtcaaacgcttgagttttacccgtgtactagcgaagagatcgatcacgaggacattaccaaagacaaaacctccaccgtcgaggcctgccttccacttgaactgacgaaaaatgagtcatgcttaaattctcgtgaaacctccttcattactaacggatcgtgcctggcctcgcgcaagacttcgttcatgatggcattatgcttgtcgtctatttatgaagaccttaaaatgtatcaagtggagttcaagacgatgaatgcaaaacttcttatggacccgaagcgtcaaatcttcttagaccaaaacatgttggccgtgatcgatgaactgatgcaagccttgaattttaattcggaaactgtaccgcaaaaatcttctcttgaagaaccggatttctataagaccaaaattaaactttgtattttacttcacgctttccgcatccgtgcagtaactatcgaccgcgtaatgagttaccttaacgcctcgggtggcgagctcggtggcagtggtaagcctatccctaaccctctcctcggcctcgattctacgggatccggtcatcaccaccatcaccatcaccat

SEQ ID NO: 1155 - skipped

SEQ ID NO: 1156 - DNA, 1758 bp, Artificial Sequence
  Description of Artificial Sequence: Synthetic polynucleotide
atgaaatatcttcttccaacggctgctgctggtttattgcttcttgccgcccagcctgcgatggctgtcgactataaggatgacgacgacaagcaattgggcggtggcatctgggagcttaagaaggacgtgtatgtagtggagttagactggtatccagatgcccccggagagatggtggtcttaacatgtgacactccagaggaggacgggattacctggacacttgaccagtcaagcgaggtattgggttctggaaagacgcttactattcaagtcaaagaatttggggatgccgggcagtatacatgtcacaagggcggcgaagttctgtcgcactccttacttttgttacacaaaaaagaagacggcatttggtccacagacatccttaaggaccaaaaggagccgaagaataagacgtttctgcgctgtgaagcgaagaactatagtggtcgctttacttgctggtggttgacgaccatttccactgatttaaccttttcggtaaagagttctcgcgggagttccgacccacagggcgtgacttgtggcgcagccacactttcggcggaacgcgttcgtggggacaataaggaatacgaatattcggtcgagtgtcaggaagattcagcttgccctgccgctgaggagtcacttccgattgaagtgatggttgacgccgtgcacaaattaaagtatgaaaattacacgtcatctttctttatccgtgacattattaagcccgacccgccaaagaatctgcagcttaaacccctgaagaacagccgccaggtggaagtaagctgggaatatcctgacacctggtccactccgcattcgtatttctcgttgacgttttgtgttcaggtgcagggaaagagcaagcgcgaaaagaaggatcgcgtctttacagacaaaacgtccgcgacggttatttgtcgtaagaatgctagtatctctgttcgcgctcaggaccgttattactcatctagttggtcggagtgggcctcggttccctgctctgggggtggaggatcgggtggaggtggctcgggaggtggcggctcccgtaatttaccggtggctactcctgacccagggatgttcccgtgcttgcaccatagccaaaacttacttcgcgctgtcagcaacatgcttcagaaagcacgtcaaacgcttgagttttacccgtgtactagcgaagagatcgatcacgaggacattaccaaagacaaaacctccaccgtcgaggcctgccttccacttgaactgacgaaaaatgagtcatgcttaaattctcgtgaaacctccttcattactaacggatcgtgcctggcctcgcgcaagacttcgttcatgatggcattatgcttgtcgtctatttatgaagaccttaaaatgtatcaagtggagttcaagacgatgaatgcaaaacttcttatggacccgaagcgtcaaatcttcttagaccaaaacatgttggccgtgatcgatgaactgatgcaagccttgaattttaattcggaaactgtaccgcaaaaatcttctcttgaagaaccggatttctataagaccaaaattaaactttgtattttacttcacgctttccgcatccgtgcagtaactatcgaccgcgtaatgagttaccttaacgcctcgggtggcgagctcggtggcagtggtaagcctatccctaaccctctcctcggcctcgattctacgggatccggtcatcaccaccatcaccatcaccat

SEQ ID NO: 1157 - DNA, 99 bp, Artificial Sequence
  Description of Artificial Sequence: Synthetic oligonucleotide
atggggtacaaaatgaacattagctcgcttcgcaaagcattcatttttatgggggctgttgcagctttaagccttgtcaatgcccagtcagcgcttgcc

SEQ ID NO: 1158 - DNA, 57 bp, Artificial Sequence
  Description of Artificial Sequence: Synthetic oligonucleotide
atgaaaaagatttggctggctcttgccggtttagtcctggcattcagcgcaagcgcg

SEQ ID NO: 1159 - DNA, 63 bp, Artificial Sequence
  Description of Artificial Sequence: Synthetic oligonucleotide
atgaaacagagcacaatcgctttagccttgctgcctcttcttttcacgcctgtcacgaaggca

SEQ ID NO: 1160 - DNA, 63 bp, Artificial Sequence
  Description of Artificial Sequence: Synthetic oligonucleotide
atgaagcaggctctgcgcgtggcatttgggttcctgatcttatgggcgtccgtcttacacgca

SEQ ID NO: 1161 - DNA, 78 bp, Artificial Sequence
  Description of Artificial Sequence: Synthetic oligonucleotide
atgaaaatcaagacgggggcacgcattcttgccttgagcgccttgacaacgatgatgttcagtgcaagtgcattagcg

SEQ ID NO: 1162 - DNA, 69 bp, Artificial Sequence
  Description of Artificial Sequence: Synthetic oligonucleotide
atgaataagaaagtcttgacattgtcggcggtcatggcctcgatgttgttcggggcagcagcccacgca

SEQ ID NO: 1163 - DNA, 66 bp, Artificial Sequence
  Description of Artificial Sequence: Synthetic oligonucleotide
atgatgaagcgtaacatcttagccgttattgtccccgcattgcttgtggccgggacggctaacgca

SEQ ID NO: 1164 - DNA, 63 bp, Artificial Sequence; identical to SEQ ID NO: 1144
  Description of Artificial Sequence: Synthetic oligonucleotide

SEQ ID NO: 1165 - DNA, 54 bp, Artificial Sequence
  Description of Artificial Sequence: Synthetic oligonucleotide
atgcgcgtgttattgttcttgctgctgagcttgtttatgttaccagctttcagt

SEQ ID NO: 1166 - DNA, 75 bp, Artificial Sequence
  Description of Artificial Sequence: Synthetic oligonucleotide
atgatgattaccttacgcaagttgccccttgcggtagccgttgctgctggtgtgatgtccgcgcaagcaatggct

SEQ ID NO: 1167 - DNA, 66 bp, Artificial Sequence
  Description of Artificial Sequence: Synthetic oligonucleotide
atgaaatatcttcttccaacggctgctgctggtttattgcttcttgccgcccagcctgcgatggct

SEQ ID NO: 1168 - DNA, 1554 bp, Artificial Sequence
  Description of Artificial Sequence: Synthetic polynucleotide
atctgggagcttaagaaggacgtgtatgtagtggagttagactggtatccagatgcccccggagagatggtggtcttaacatgtgacactccagaggaggacgggattacctggacacttgaccagtcaagcgaggtattgggttctggaaagacgcttactattcaagtcaaagaatttggggatgccgggcagtatacatgtcacaagggcggcgaagttctgtcgcactccttacttttgttacacaaaaaagaagacggcatttggtccacagacatccttaaggaccaaaaggagccgaagaataagacgtttctgcgctgtgaagcgaagaactatagtggtcgctttacttgctggtggttgacgaccatttccactgatttaaccttttcggtaaagagttctcgcgggagttccgacccacagggcgtgacttgtggcgcagccacactttcggcggaacgcgttcgtggggacaataaggaatacgaatattcggtcgagtgtcaggaagattcagcttgccctgccgctgaggagtcacttccgattgaagtgatggttgacgccgtgcacaaattaaagtatgaaaattacacgtcatctttctttatccgtgacattattaagcccgacccgccaaagaatctgcagcttaaacccctgaagaacagccgccaggtggaagtaagctgggaatatcctgacacctggtccactccgcattcgtatttctcgttgacgttttgtgttcaggtgcagggaaagagcaagcgcgaaaagaaggatcgcgtctttacagacaaaacgtccgcgacggttatttgtcgtaagaatgctagtatctctgttcgcgctcaggaccgttattactcatctagttggtcggagtgggcctcggttccctgctctgggggtggaggatcgggtggaggtggctcgggaggtggcggctcccgtaatttaccggtggctactcctgacccagggatgttcccgtgcttgcaccatagccaaaacttacttcgcgctgtcagcaacatgcttcagaaagcacgtcaaacgcttgagttttacccgtgtactagcgaagagatcgatcacgaggacattaccaaagacaaaacctccaccgtcgaggcctgccttccacttgaactgacgaaaaatgagtcatgcttaaattctcgtgaaacctccttcattactaacggatcgtgcctggcctcgcgcaagacttcgttcatgatggcattatgcttgtcgtctatttatgaagaccttaaaatgtatcaagtggagttcaagacgatgaatgcaaaacttcttatggacccgaagcgtcaaatcttcttagaccaaaacatgttggccgtgatcgatgaactgatgcaagccttgaattttaattcggaaactgtaccgcaaaaatcttctcttgaagaaccggatttctataagaccaaaattaaactttgtattttacttcacgctttccgcatccgtgcagtaactatcgaccgcgtaatgagttaccttaacgcctcg

SEQ ID NO: 1169 - protein, 597 aa, Artificial Sequence
  Description of Artificial Sequence: Synthetic polypeptide
MGYKMNISSLRKAFIFMGAVAALSLVNAQSALAVDYKDDDDKQLGGGIWELKKDVYVVELDWYPDAPGEMVVLTCDTPEEDGITWTLDQSSEVLGSGKTLTIQVKEFGDAGQYTCHKGGEVLSHSLLLLHKKEDGIWSTDILKDQKEPKNKTFLRCEAKNYSGRFTCWWLTTISTDLTFSVKSSRGSSDPQGVTCGAATLSAERVRGDNKEYEYSVECQEDSACPAAEESLPIEVMVDAVHKLKYENYTSSFFIRDIIKPDPPKNLQLKPLKNSRQVEVSWEYPDTWSTPHSYFSLTFCVQVQGKSKREKKDRVFTDKTSATVICRKNASISVRAQDRYYSSSWSEWASVPCSGGGGSGGGGSGGGGSRNLPVATPDPGMFPCLHHSQNLLRAVSNMLQKARQTLEFYPCTSEEIDHEDITKDKTSTVEACLPLELTKNESCLNSRETSFITNGSCLASRKTSFMMALCLSSIYEDLKMYQVEFKTMNAKLLMDPKRQIFLDQNMLAVIDELMQALNFNSETVPQKSSLEEPDFYKTKIKLCILLHAFRIRAVTIDRVMSYLNASGGELGGSGKPIPNPLLGLDSTGSGHHHHHHHH

SEQ ID NO: 1170 - protein, 583 aa, Artificial Sequence
  Description of Artificial Sequence: Synthetic polypeptide
MKKIWLALAGLVLAFSASAVDYKDDDDKQLGGGIWELKKDVYVVELDWYPDAPGEMVVLTCDTPEEDGITWTLDQSSEVLGSGKTLTIQVKEFGDAGQYTCHKGGEVLSHSLLLLHKKEDGIWSTDILKDQKEPKNKTFLRCEAKNYSGRFTCWWLTTISTDLTFSVKSSRGSSDPQGVTCGAATLSAERVRGDNKEYEYSVECQEDSACPAAEESLPIEVMVDAVHKLKYENYTSSFFIRDIIKPDPPKNLQLKPLKNSRQVEVSWEYPDTWSTPHSYFSLTFCVQVQGKSKREKKDRVFTDKTSATVICRKNASISVRAQDRYYSSSWSEWASVPCSGGGGSGGGGSGGGGSRNLPVATPDPGMFPCLHHSQNLLRAVSNMLQKARQTLEFYPCTSEEIDHEDITKDKTSTVEACLPLELTKNESCLNSRETSFITNGSCLASRKTSFMMALCLSSIYEDLKMYQVEFKTMNAKLLMDPKRQIFLDQNMLAVIDELMQALNFNSETVPQKSSLEEPDFYKTKIKLCILLHAFRIRAVTIDRVMSYLNASGGELGGSGKPIPNPLLGLDSTGSGHHHHHHHH

SEQ ID NO: 1171 - protein, 585 aa, Artificial Sequence
  Description of Artificial Sequence: Synthetic polypeptide
MKQSTIALALLPLLFTPVTKAVDYKDDDDKQLGGGIWELKKDVYVVELDWYPDAPGEMVVLTCDTPEEDGITWTLDQSSEVLGSGKTLTIQVKEFGDAGQYTCHKGGEVLSHSLLLLHKKEDGIWSTDILKDQKEPKNKTFLRCEAKNYSGRFTCWWLTTISTDLTFSVKSSRGSSDPQGVTCGAATLSAERVRGDNKEYEYSVECQEDSACPAAEESLPIEVMVDAVHKLKYENYTSSFFIRDIIKPDPPKNLQLKPLKNSRQVEVSWEYPDTWSTPHSYFSLTFCVQVQGKSKREKKDRVFTDKTSATVICRKNASISVRAQDRYYSSSWSEWASVPCSGGGGSGGGGSGGGGSRNLPVATPDPGMFPCLHHSQNLLRAVSNMLQKARQTLEFYPCTSEEIDHEDITKDKTSTVEACLPLELTKNESCLNSRETSFITNGSCLASRKTSFMMALCLSSIYEDLKMYQVEFKTMNAKLLMDPKRQIFLDQNMLAVIDELMQALNFNSETVPQKSSLEEPDFYKTKIKLCILLHAFRIRAVTIDRVMSYLNASGGELGGSGKPIPNPLLGLDSTGSGHHHHHHHH

SEQ ID NO: 1172 - protein, 585 aa, Artificial Sequence
  Description of Artificial Sequence: Synthetic polypeptide
MKQALRVAFGFLILWASVLHAVDYKDDDDKQLGGGIWELKKDVYVVELDWYPDAPGEMVVLTCDTPEEDGITWTLDQSSEVLGSGKTLTIQVKEFGDAGQYTCHKGGEVLSHSLLLLHKKEDGIWSTDILKDQKEPKNKTFLRCEAKNYSGRFTCWWLTTISTDLTFSVKSSRGSSDPQGVTCGAATLSAERVRGDNKEYEYSVECQEDSACPAAEESLPIEVMVDAVHKLKYENYTSSFFIRDIIKPDPPKNLQLKPLKNSRQVEVSWEYPDTWSTPHSYFSLTFCVQVQGKSKREKKDRVFTDKTSATVICRKNASISVRAQDRYYSSSWSEWASVPCSGGGGSGGGGSGGGGSRNLPVATPDPGMFPCLHHSQNLLRAVSNMLQKARQTLEFYPCTSEEIDHEDITKDKTSTVEACLPLELTKNESCLNSRETSFITNGSCLASRKTSFMMALCLSSIYEDLKMYQVEFKTMNAKLLMDPKRQIFLDQNMLAVIDELMQALNFNSETVPQKSSLEEPDFYKTKIKLCILLHAFRIRAVTIDRVMSYLNASGGELGGSGKPIPNPLLGLDSTGSGHHHHHHHH

SEQ ID NO: 1173 - protein, 590 aa, Artificial Sequence
  Description of Artificial Sequence: Synthetic polypeptide
MKIKTGARILALSALTTMMFSASALAVDYKDDDDKQLGGGIWELKKDVYVVELDWYPDAPGEMVVLTCDTPEEDGITWTLDQSSEVLGSGKTLTIQVKEFGDAGQYTCHKGGEVLSHSLLLLHKKEDGIWSTDILKDQKEPKNKTFLRCEAKNYSGRFTCWWLTTISTDLTFSVKSSRGSSDPQGVTCGAATLSAERVRGDNKEYEYSVECQEDSACPAAEESLPIEVMVDAVHKLKYENYTSSFFIRDIIKPDPPKNLQLKPLKNSRQVEVSWEYPDTWSTPHSYFSLTFCVQVQGKSKREKKDRVFTDKTSATVICRKNASISVRAQDRYYSSSWSEWASVPCSGGGGSGGGGSGGGGSRNLPVATPDPGMFPCLHHSQNLLRAVSNMLQKARQTLEFYPCTSEEIDHEDITKDKTSTVEACLPLELTKNESCLNSRETSFITNGSCLASRKTSFMMALCLSSIYEDLKMYQVEFKTMNAKLLMDPKRQIFLDQNMLAVIDELMQALNFNSETVPQKSSLEEPDFYKTKIKLCILLHAFRIRAVTIDRVMSYLNASGGELGGSGKPIPNPLLGLDSTGSGHHHHHHHH

SEQ ID NO: 1174 - protein, 587 aa, Artificial Sequence
  Description of Artificial Sequence: Synthetic polypeptide
MNKKVLTLSAVMASMLFGAAAHAVDYKDDDDKQLGGGIWELKKDVYVVELDWYPDAPGEMVVLTCDTPEEDGITWTLDQSSEVLGSGKTLTIQVKEFGDAGQYTCHKGGEVLSHSLLLLHKKEDGIWSTDILKDQKEPKNKTFLRCEAKNYSGRFTCWWLTTISTDLTFSVKSSRGSSDPQGVTCGAATLSAERVRGDNKEYEYSVECQEDSACPAAEESLPIEVMVDAVHKLKYENYTSSFFIRDIIKPDPPKNLQLKPLKNSRQVEVSWEYPDTWSTPHSYFSLTFCVQVQGKSKREKKDRVFTDKTSATVICRKNASISVRAQDRYYSSSWSEWASVPCSGGGGSGGGGSGGGGSRNLPVATPDPGMFPCLHHSQNLLRAVSNMLQKARQTLEFYPCTSEEIDHEDITKDKTSTVEACLPLELTKNESCLNSRETSFITNGSCLASRKTSFMMALCLSSIYEDLKMYQVEFKTMNAKLLMDPKRQIFLDQNMLAVIDELMQALNFNSETVPQKSSLEEPDFYKTKIKLCILLHAFRIRAVTIDRVMSYLNASGGELGGSGKPIPNPLLGLDSTGSGHHHHHHHH

SEQ ID NO: 1175 - protein, 586 aa, Artificial Sequence
  Description of Artificial Sequence: Synthetic polypeptide
MMKRNILAVIVPALLVAGTANAVDYKDDDDKQLGGGIWELKKDVYVVELDWYPDAPGEMVVLTCDTPEEDGITWTLDQSSEVLGSGKTLTIQVKEFGDAGQYTCHKGGEVLSHSLLLLHKKEDGIWSTDILKDQKEPKNKTFLRCEAKNYSGRFTCWWLTTISTDLTFSVKSSRGSSDPQGVTCGAATLSAERVRGDNKEYEYSVECQEDSACPAAEESLPIEVMVDAVHKLKYENYTSSFFIRDIIKPDPPKNLQLKPLKNSRQVEVSWEYPDTWSTPHSYFSLTFCVQVQGKSKREKKDRVFTDKTSATVICRKNASISVRAQDRYYSSSWSEWASVPCSGGGGSGGGGSGGGGSRNLPVATPDPGMFPCLHHSQNLLRAVSNMLQKARQTLEFYPCTSEEIDHEDITKDKTSTVEACLPLELTKNESCLNSRETSFITNGSCLASRKTSFMMALCLSSIYEDLKMYQVEFKTMNAKLLMDPKRQIFLDQNMLAVIDELMQALNFNSETVPQKSSLEEPDFYKTKIKLCILLHAFRIRAVTIDRVMSYLNASGGELGGSGKPIPNPLLGLDSTGSGHHHHHHHH

SEQ ID NO: 1176 - protein, 585 aa, Artificial Sequence
  Description of Artificial Sequence: Synthetic polypeptide
MKKTAIAIAVALAGFATVAQAVDYKDDDDKQLGGGIWELKKDVYVVELDWYPDAPGEMVVLTCDTPEEDGITWTLDQSSEVLGSGKTLTIQVKEFGDAGQYTCHKGGEVLSHSLLLLHKKEDGIWSTDILKDQKEPKNKTFLRCEAKNYSGRFTCWWLTTISTDLTFSVKSSRGSSDPQGVTCGAATLSAERVRGDNKEYEYSVECQEDSACPAAEESLPIEVMVDAVHKLKYENYTSSFFIRDIIKPDPPKNLQLKPLKNSRQVEVSWEYPDTWSTPHSYFSLTFCVQVQGKSKREKKDRVFTDKTSATVICRKNASISVRAQDRYYSSSWSEWASVPCSGGGGSGGGGSGGGGSRNLPVATPDPGMFPCLHHSQNLLRAVSNMLQKARQTLEFYPCTSEEIDHEDITKDKTSTVEACLPLELTKNESCLNSRETSFITNGSCLASRKTSFMMALCLSSIYEDLKMYQVEFKTMNAKLLMDPKRQIFLDQNMLAVIDELMQALNFNSETVPQKSSLEEPDFYKTKIKLCILLHAFRIRAVTIDRVMSYLNASGGELGGSGKPIPNPLLGLDSTGSGHHHHHHHH

SEQ ID NO: 1177 - protein, 582 aa, Artificial Sequence
  Description of Artificial Sequence: Synthetic polypeptide
MRVLLFLLLSLFMLPAFSVDYKDDDDKQLGGGIWELKKDVYVVELDWYPDAPGEMVVLTCDTPEEDGITWTLDQSSEVLGSGKTLTIQVKEFGDAGQYTCHKGGEVLSHSLLLLHKKEDGIWSTDILKDQKEPKNKTFLRCEAKNYSGRFTCWWLTTISTDLTFSVKSSRGSSDPQGVTCGAATLSAERVRGDNKEYEYSVECQEDSACPAAEESLPIEVMVDAVHKLKYENYTSSFFIRDIIKPDPPKNLQLKPLKNSRQVEVSWEYPDTWSTPHSYFSLTFCVQVQGKSKREKKDRVFTDKTSATVICRKNASISVRAQDRYYSSSWSEWASVPCSGGGGSGGGGSGGGGSRNLPVATPDPGMFPCLHHSQNLLRAVSNMLQKARQTLEFYPCTSEEIDHEDITKDKTSTVEACLPLELTKNESCLNSRETSFITNGSCLASRKTSFMMALCLSSIYEDLKMYQVEFKTMNAKLLMDPKRQIFLDQNMLAVIDELMQALNFNSETVPQKSSLEEPDFYKTKIKLCILLHAFRIRAVTIDRVMSYLNASGGELGGSGKPIPNPLLGLDSTGSGHHHHHHHH

SEQ ID NO: 1178 - protein, 589 aa, Artificial Sequence
  Description of Artificial Sequence: Synthetic polypeptide
MMITLRKLPLAVAVAAGVMSAQAMAVDYKDDDDKQLGGGIWELKKDVYVVELDWYPDAPGEMVVLTCDTPEEDGITWTLDQSSEVLGSGKTLTIQVKEFGDAGQYTCHKGGEVLSHSLLLLHKKEDGIWSTDILKDQKEPKNKTFLRCEAKNYSGRFTCWWLTTISTDLTFSVKSSRGSSDPQGVTCGAATLSAERVRGDNKEYEYSVECQEDSACPAAEESLPIEVMVDAVHKLKYENYTSSFFIRDIIKPDPPKNLQLKPLKNSRQVEVSWEYPDTWSTPHSYFSLTFCVQVQGKSKREKKDRVFTDKTSATVICRKNASISVRAQDRYYSSSWSEWASVPCSGGGGSGGGGSGGGGSRNLPVATPDPGMFPCLHHSQNLLRAVSNMLQKARQTLEFYPCTSEEIDHEDITKDKTSTVEACLPLELTKNESCLNSRETSFITNGSCLASRKTSFMMALCLSSIYEDLKMYQVEFKTMNAKLLMDPKRQIFLDQNMLAVIDELMQALNFNSETVPQKSSLEEPDFYKTKIKLCILLHAFRIRAVTIDRVMSYLNASGGELGGSGKPIPNPLLGLDSTGSGHHHHHHHH

SEQ ID NO: 1179 - protein, 586 aa, Artificial Sequence
  Description of Artificial Sequence: Synthetic polypeptide
MKYLLPTAAAGLLLLAAQPAMAVDYKDDDDKQLGGGIWELKKDVYVVELDWYPDAPGEMVVLTCDTPEEDGITWTLDQSSEVLGSGKTLTIQVKEFGDAGQYTCHKGGEVLSHSLLLLHKKEDGIWSTDILKDQKEPKNKTFLRCEAKNYSGRFTCWWLTTISTDLTFSVKSSRGSSDPQGVTCGAATLSAERVRGDNKEYEYSVECQEDSACPAAEESLPIEVMVDAVHKLKYENYTSSFFIRDIIKPDPPKNLQLKPLKNSRQVEVSWEYPDTWSTPHSYFSLTFCVQVQGKSKREKKDRVFTDKTSATVICRKNASISVRAQDRYYSSSWSEWASVPCSGGGGSGGGGSGGGGSRNLPVATPDPGMFPCLHHSQNLLRAVSNMLQKARQTLEFYPCTSEEIDHEDITKDKTSTVEACLPLELTKNESCLNSRETSFITNGSCLASRKTSFMMALCLSSIYEDLKMYQVEFKTMNAKLLMDPKRQIFLDQNMLAVIDELMQALNFNSETVPQKSSLEEPDFYKTKIKLCILLHAFRIRAVTIDRVMSYLNASGGELGGSGKPIPNPLLGLDSTGSGHHHHHHHH

SEQ ID NO: 1180 - protein, 33 aa, Artificial Sequence
  Description of Artificial Sequence: Synthetic polypeptide
MGYKMNISSLRKAFIFMGAVAALSLVNAQSALA

SEQ ID NO: 1181 - protein, 19 aa, Artificial Sequence
  Description of Artificial Sequence: Synthetic peptide
MKKIWLALAGLVLAFSASA

SEQ ID NO: 1182 - protein, 21 aa, Artificial Sequence
  Description of Artificial Sequence: Synthetic peptide
MKQSTIALALLPLLFTPVTKA

SEQ ID NO: 1183 - protein, 21 aa, Artificial Sequence
  Description of Artificial Sequence: Synthetic peptide
MKQALRVAFGFLILWASVLHA

SEQ ID NO: 1184 - protein, 26 aa, Artificial Sequence
  Description of Artificial Sequence: Synthetic peptide
MKIKTGARILALSALTTMMFSASALA

SEQ ID NO: 1185 - protein, 23 aa, Artificial Sequence
  Description of Artificial Sequence: Synthetic peptide
MNKKVLTLSAVMASMLFGAAAHA

SEQ ID NO: 1186 - protein, 26 aa, Artificial Sequence
  Description of Artificial Sequence: Synthetic peptide
MTNITKRSLVAAGVLAALMAGNVALA

SEQ ID NO: 1187 - protein, 21 aa, Artificial Sequence
  Description of Artificial Sequence: Synthetic peptide
MKKTAIAIAVALAGFATVAQA

SEQ ID NO: 1188 - protein, 18 aa, Artificial Sequence
  Description of Artificial Sequence: Synthetic peptide
MRVLLFLLLSLFMLPAFS

SEQ ID NO: 1189 - protein, 25 aa, Artificial Sequence
  Description of Artificial Sequence: Synthetic peptide
MMITLRKLPLAVAVAAGVMSAQAMA

SEQ ID NO: 1190 - protein, 22 aa, Artificial Sequence
  Description of Artificial Sequence: Synthetic peptide
MKYLLPTAAAGLLLLAAQPAMA

SEQ ID NO: 1191 - protein, 518 aa, Artificial Sequence
  Description of Artificial Sequence: Synthetic polypeptide
IWELKKDVYVVELDWYPDAPGEMVVLTCDTPEEDGITWTLDQSSEVLGSGKTLTIQVKEFGDAGQYTCHKGGEVLSHSLLLLHKKEDGIWSTDILKDQKEPKNKTFLRCEAKNYSGRFTCWWLTTISTDLTFSVKSSRGSSDPQGVTCGAATLSAERVRGDNKEYEYSVECQEDSACPAAEESLPIEVMVDAVHKLKYENYTSSFFIRDIIKPDPPKNLQLKPLKNSRQVEVSWEYPDTWSTPHSYFSLTFCVQVQGKSKREKKDRVFTDKTSATVICRKNASISVRAQDRYYSSSWSEWASVPCSGGGGSGGGGSGGGGSRNLPVATPDPGMFPCLHHSQNLLRAVSNMLQKARQTLEFYPCTSEEIDHEDITKDKTSTVEACLPLELTKNESCLNSRETSFITNGSCLASRKTSFMMALCLSSIYEDLKMYQVEFKTMNAKLLMDPKRQIFLDQNMLAVIDELMQALNFNSETVPQKSSLEEPDFYKTKIKLCILLHAFRIRAVTIDRVMSYLNAS

SEQ ID NO: 1192 - protein, 305 aa, Homo sapiens
IWELKKDVYVVELDWYPDAPGEMVVLTCDTPEEDGITWTLDQSSEVLGSGKTLTIQVKEFGDAGQYTCHKGGEVLSHSLLLLHKKEDGIWSTDILKDQKEPKNKTFLRCEAKNYSGRFTCWWLTTISTDLTFSVKSSRGSSDPQGVTCGAATLSAERVRGDNKEYEYSVECQEDSACPAAEESLPIEVMVDAVHKLKYENYTSSFFIRDIIKPDPPKNLQLKPLKNSRQVEVSWEYPDTWSTPHSYFSLTFCVQVQGKSKREKKDRVFTDKTSATVICRKNASISVRAQDRYYSSSWSEWASVPC

SEQ ID NO: 1193 - protein, 197 aa, Homo sapiens; identical to SEQ ID NO: 1053

SEQ ID NO: 1194 - protein, 16 aa, Artificial Sequence
  Description of Artificial Sequence: Synthetic peptide
SGGGGSGGGGSGGGGS

SEQ ID NO: 1195 - DNA, 711 bp, Artificial Sequence
  Description of Artificial Sequence: Synthetic polynucleotide
atggggtacaaaatgaacattagctcgcttcgcaaagcattcatttttatgggggctgttgcagctttaagccttgtcaatgcccagtcagcgcttgccatgatcacttgtccgccccccatgtctgtggaacacgcggatatttgggtaaagagctactcactgtacagccgtgaacgttatatttgtaactccggcttcaaacgcaaagcaggaacttcatcactgacggagtgtgttttaaataaagctactaacgtcgcgcactggactactccctcattgaagtgcatccgtgatcctgctctgggtggcgggggtagcggcgggggtggaagcgggggtggagggtctggaggaggtgggtctaactgggtgaatgttatctcagatttaaagaaaattgaagacctgatccaatctatgcacatcgacgctactctgtatacagaatcagatgtacatccttcgtgtaaagtgaccgcgatgaagtgttttttgcttgagctgcaagtaatttcccttgagtccggggacgcttcaatccatgacacggtcgagaacctgatcattctggcaaacaatagtttatcatcgaacggtaatgttaccgaatcgggttgcaaagaatgcgaagagttagaggaaaagaacattaaagaatttttgcaatccttcgttcacattgtgcagatgttcattaatacatcg

SEQ ID NO: 1196 - DNA, 666 bp, Artificial Sequence
  Description of Artificial Sequence: Synthetic polynucleotide
atgcgcgtgttattgttcttgctgctgagcttgtttatgttaccagctttcagtatgatcacttgtccgccccccatgtctgtggaacacgcggatatttgggtaaagagctactcactgtacagccgtgaacgttatatttgtaactccggcttcaaacgcaaagcaggaacttcatcactgacggagtgtgttttaaataaagctactaacgtcgcgcactggactactccctcattgaagtgcatccgtgatcctgctctgggtggcgggggtagcggcgggggtggaagcgggggtggagggtctggaggaggtgggtctaactgggtgaatgttatctcagatttaaagaaaattgaagacctgatccaatctatgcacatcgacgctactctgtatacagaatcagatgtacatccttcgtgtaaagtgaccgcgatgaagtgttttttgcttgagctgcaagtaatttcccttgagtccggggacgcttcaatccatgacacggtcgagaacctgatcattctggcaaacaatagtttatcatcgaacggtaatgttaccgaatcgggttgcaaagaatgcgaagagttagaggaaaagaacattaaagaatttttgcaatccttcgttcacattgtgcagatgttcattaatacatcg

SEQ ID NO: 1197 - DNA, 678 bp, Artificial Sequence
  Description of Artificial Sequence: Synthetic polynucleotide
atgaaatatcttcttccaacggctgctgctggtttattgcttcttgccgcccagcctgcgatggctatgatcacttgtccgccccccatgtctgtggaacacgcggatatttgggtaaagagctactcactgtacagccgtgaacgttatatttgtaactccggcttcaaacgcaaagcaggaacttcatcactgacggagtgtgttttaaataaagctactaacgtcgcgcactggactactccctcattgaagtgcatccgtgatcctgctctgggtggcgggggtagcggcgggggtggaagcgggggtggagggtctggaggaggtgggtctaactgggtgaatgttatctcagatttaaagaaaattgaagacctgatccaatctatgcacatcgacgctactctgtatacagaatcagatgtacatccttcgtgtaaagtgaccgcgatgaagtgttttttgcttgagctgcaagtaatttcccttgagtccggggacgcttcaatccatgacacggtcgagaacctgatcattctggcaaacaatagtttatcatcgaacggtaatgttaccgaatcgggttgcaaagaatgcgaagagttagaggaaaagaacattaaagaatttttgcaatccttcgttcacattgtgcagatgttcattaatacatcg

SEQ ID NO: 1198 - DNA, 612 bp, Artificial Sequence
  Description of Artificial Sequence: Synthetic polynucleotide
atgatcacttgtccgccccccatgtctgtggaacacgcggatatttgggtaaagagctactcactgtacagccgtgaacgttatatttgtaactccggcttcaaacgcaaagcaggaacttcatcactgacggagtgtgttttaaataaagctactaacgtcgcgcactggactactccctcattgaagtgcatccgtgatcctgctctgggtggcgggggtagcggcgggggtggaagcgggggtggagggtctggaggaggtgggtctaactgggtgaatgttatctcagatttaaagaaaattgaagacctgatccaatctatgcacatcgacgctactctgtatacagaatcagatgtacatccttcgtgtaaagtgaccgcgatgaagtgttttttgcttgagctgcaagtaatttcccttgagtccggggacgcttcaatccatgacacggtcgagaacctgatcattctggcaaacaatagtttatcatcgaacggtaatgttaccgaatcgggttgcaaagaatgcgaagagttagaggaaaagaacattaaagaatttttgcaatccttcgttcacattgtgcagatgttcattaatacatcg

SEQ ID NO: 1199 - protein, 20 aa, Artificial Sequence
  Description of Artificial Sequence: Synthetic peptide
GGGGSGGGGSGGGGSGGGGS

SEQ ID NO: 1200 - protein, 237 aa, Artificial Sequence
  Description of Artificial Sequence: Synthetic polypeptide
MGYKMNISSLRKAFIFMGAVAALSLVNAQSALAMITCPPPMSVEHADIWVKSYSLYSRERYICNSGFKRKAGTSSLTECVLNKATNVAHWTTPSLKCIRDPALGGGGSGGGGSGGGGSGGGGSNWVNVISDLKKIEDLIQSMHIDATLYTESDVHPSCKVTAMKCFLLELQVISLESGDASIHDTVENLIILANNSLSSNGNVTESGCKECEELEEKNIKEFLQSFVHIVQMFINTS

SEQ ID NO: 1201 - protein, 222 aa, Artificial Sequence
  Description of Artificial Sequence: Synthetic polypeptide
MRVLLFLLLSLFMLPAFSMITCPPPMSVEHADIWVKSYSLYSRERYICNSGFKRKAGTSSLTECVLNKATNVAHWTTPSLKCIRDPALGGGGSGGGGSGGGGSGGGGSNWVNVISDLKKIEDLIQSMHIDATLYTESDVHPSCKVTAMKCFLLELQVISLESGDASIHDTVENLIILANNSLSSNGNVTESGCKECEELEEKNIKEFLQSFVHIVQMFINTS

SEQ ID NO: 1202 - protein, 226 aa, Artificial Sequence
  Description of Artificial Sequence: Synthetic polypeptide
MKYLLPTAAAGLLLLAAQPAMAMITCPPPMSVEHADIWVKSYSLYSRERYICNSGFKRKAGTSSLTECVLNKATNVAHWTTPSLKCIRDPALGGGGSGGGGSGGGGSGGGGSNWVNVISDLKKIEDLIQSMHIDATLYTESDVHPSCKVTAMKCFLLELQVISLESGDASIHDTVENLIILANNSLSSNGNVTESGCKECEELEEKNIKEFLQSFVHIVQMFINTS

SEQ ID NO: 1203 - protein, 204 aa, Artificial Sequence
  Description of Artificial Sequence: Synthetic polypeptide
MITCPPPMSVEHADIWVKSYSLYSRERYICNSGFKRKAGTSSLTECVLNKATNVAHWTTPSLKCIRDPALGGGGSGGGGSGGGGSGGGGSNWVNVISDLKKIEDLIQSMHIDATLYTESDVHPSCKVTAMKCFLLELQVISLESGDASIHDTVENLIILANNSLSSNGNVTESGCKECEELEEKNIKEFLQSFVHIVQMFINTS

SEQ ID NO: 1204 - protein, 114 aa, Homo sapiens; identical to SEQ ID NO: 1057

SEQ ID NO: 1205 - protein, 73 aa, Artificial Sequence; identical to SEQ ID NO: 1061
  Description of Artificial Sequence: Synthetic polypeptide

SEQ ID NO: 1206 - protein, 94 aa, Artificial Sequence; identical to SEQ ID NO: 1073
  Description of Artificial Sequence: Synthetic polypeptide

SEQ ID NO: 1207 - DNA, 222 bp, Artificial Sequence; identical to SEQ ID NO: 1071
  Description of Artificial Sequence: Synthetic polynucleotide

SEQ ID NO: 1208 - DNA, 285 bp, Artificial Sequence
  Description of Artificial Sequence: Synthetic polynucleotide
atgaagcaaagtacgatcgcccttgcgctgttgccccttcttttcacgcccgtcaccaaggcagtgcccctgagccgcaccgtgcgttgtacgtgtatctccatctcaaaccagccggtaaacccgcgtagtttagaaaaactggagattatcccagccagccagttttgcccgcgcgttgagattattgcgaccatgaagaaaaaaggggaaaaacgttgccttaatccagaaagtaaggctatcaaaaacctgttgaaagctgtctcgaaagagcgttcctaa

SEQ ID NO: 1209 - protein, 273 aa, Artificial Sequence
  Description of Artificial Sequence: Synthetic polypeptide
MDFSNMSILHYLANIVDILVVWFVIYKVIMLIRGTKAVQLLKGIFIIIAVKLLSGFFGLQTVEWITDQMLTWGFLAIIIIFQPELRRALETLGRGNIFTRYGSRIEREQHHLIESIEKSTQYMAKRRIGALISVARDTGMDDYIETGIPLNAKISSQLLINIFIPNTPLHDGAVIIKGNEIASAASYLPLSDSPFLSKELGTRHRAALGISEVTDSITIVVSEETGGISLTKGGELFRDVSEEELHKILLKELVTVTAKKPSIFSKWKGGKSE

SEQ ID NO: 1210 - DNA, 822 bp, Artificial Sequence
  Description of Artificial Sequence: Synthetic polynucleotide
atggacttttccaacatgagtatccttcactatttagcgaatattgtagacattttggtggtttggttcgtaatttacaaggttatcatgcttatccgcggcacgaaagccgtccagctgttgaaggggattttcattattattgccgtcaagttacttagcggcttcttcggattgcagacagtggaatggattactgatcaaatgctgacttggggtttcttagccattatcattatctttcaaccggaattgcgtcgtgccctggagactttggggcgtggcaatatctttacccgctatggatcacgcattgagcgtgaacaacaccaccttattgagtctattgaaaagtccacgcaatacatggcgaagcgtcgcattggagctttgatctctgtggctcgtgatacaggcatggacgactacatcgagactggcattccgcttaatgcgaaaatctcatcgcaattattgattaatatcttcatccccaatacccctcttcacgatggcgcagtgatcattaaaggtaacgagatcgcgagcgctgccagttatctgccattgtccgactcgccgtttctttctaaggagctgggaactcgccatcgtgccgcattagggatttccgaggtgacagattcaatcacaatcgttgtcagcgaggaaacaggtgggatttcccttacgaagggaggcgaactgttccgtgatgtatccgaagaagaattgcataagattttgcttaaagagctggtgactgtcacagctaaaaaaccaagcattttctccaaatggaaaggaggtaagtccgagtga

SEQ ID NO: 1211 - DNA, 3787 bp, Artificial Sequence
  Description of Artificial Sequence: Synthetic polynucleotide
tagcggagtgtatactggcttactatgttggcactgatgagggtgtcagtgaagtgcttcatgtggcaggagaaaaaaggctgcaccggtgcgtcagcagaatatgtgatacaggatatattccgcttcctcgctcactgactcgctacgctcggtcgttcgactgcggcgagcggaaatggcttacgaacggggcggagatttcctggaagatgccaggaagatacttaacagggaagtgagagggccgcggcaaagccgtttttccataggctccgcccccctgacaagcatcacgaaatctgacgctcaaatcagtggtggcgaaacccgacaggactataaagataccaggcgtttcccctggcggctccctcgtgcgctctcctgttcctgcctttcggtttaccggtgtcattccgctgttatggccgcgtttgtctcattccacgcctgacactcagttccgggtaggcagttcgctccaagctggactgtatgcacgaaccccccgttcagtccgaccgctgcgccttatccggtaactatcgtcttgagtccaacccggaaagacatgcaaaagcaccactggcagcagccactggtaattgatttagaggagttagtcttgaagtcatgcgccggttaaggctaaactgaaaggacaagttttggtgactgcgctcctccaagccagttacctcggttcaaagagttggtagctcagagaaccttcgaaaaaccgccctgcaaggcggttttttcgttttcagagcaagagattacgcgcagaccaaaacgatctcaagaagatcatcttattaaggggtctgacgctcagtggaacggtgcaccctgcagggctagctgataaagcgttcgcgctgcattcggcagtttaagacccactttcacatttaagttgtttttctaatccgcatatgatcaattcaaggccgaataagaaggctggctctgcaccttggtgatcaaataattcgatagcttgtcgtaataatggcggcatactatcagtagtaggtgtttccctttcttctttagcgacttgatgctcttgatcttccaatacgcaacctaaagtaaaatgccccacagcgctgagtgcatataatgcattctctagtgaaaaaccttgttggcataaaaaggctaattgattttcgagagtttcatactgtttttctgtaggccgtgtacctaaatgtacttttgctccatcgcgatgacttagtaaagcacatctaaaacttttagcgttattacgtaaaaaatcttgccagctttccccttctaaagggcaaaagtgagtatggtgcctatctaacatctcaatggctaaggcgtcgagcaaagcccgcttattttttacatgccaatacaatgtaggctgctctacacctagcttctgggcgagtttacgggttgttaaaccttcgattccgacctcattaagcagctctaatgcgctgttaatcactttacttttatctaatctagacatcattaattcctaatttttgttgacactctatcattgatagagttattttaccactccctatcagtgatagagaaaagtgaacccgcatcccacgctaactaatataaggggggcaagaatggacttttccaacatgagtatccttcactatttagcgaatattgtagacattttggtggtttggttcgtaatttacaaggttatcatgcttatccgcggcacgaaagccgtccagctgttgaaggggattttcattattattgccgtcaagttacttagcggcttcttcggattgcagacagtggaatggattactgatcaaatgctgacttggggtttcttagccattatcattatctttcaaccggaattgcgtcgtgccctggagactttggggcgtggcaatatctttacccgctatggatcacgcattgagcgtgaacaacaccaccttattgagtctattgaaaagtccacgcaatacatggcgaagcgtcgcattggagctttgatctctgtggctcgtgatacaggcatggacgactacatcgagactggcattccgcttaatgcgaaaatctcatcgcaattattgattaatatcttcatccccaatacccctcttcacgatggcgcagtgatcattaaaggtaacgagatcgcgagcgctgccagttatctgccattgtccgactcgccgtttctttctaaggagctgggaactcgccatcgtgccgcattagggatttccgaggtgacagattcaatcacaatcgttgtcagcgaggaaacaggtgggatttcccttacgaagggaggcgaactgttccgtgatgtatccgaagaagaattgcataagattttgcttaaagagctggtgactgtcacagctaaaaaaccaagcattttctccaaatggaaaggaggtaagtccgagtgaggaggaacgattggtaaacccggtgaacgcatgagaaagcccccggaagatcaccttccgggggcttttttattgcgcggaccaaaacgaaaaaagacgctcgaaagcgtctcttttctggaatttggtaccgaggcgtaatgctctgccagtgttacaaccaattaaccaattctgattagaaaaactcatcgagcatcaaatgaaactgcaatttattcatatcaggattatcaataccatatttttgaaaaagccgtttctgtaatgaaggagaaaactcaccgaggcagttccataggatggcaagatcctggtatcggtctgcgattccgactcgtccaacatcaatacaacctattaatttcccctcgtcaaaaataaggttatcaagtgagaaatcaccatgagtgacgactgaatccggtgagaatggcaaaagcttatgcatttctttccagacttgttcaacaggccagccattacgctcgtcatcaaaatcactcgcatcaaccaaaccgttattcattcgtgattgcgcctgagcgagacgaaatacgcgatcgctgttaaaaggacaattacaaacaggaatcgaatgcaaccggcgcaggaacactgccagcgcatcaacaatattttcacctgaatcaggatattcttctaatacctggaatgctgttttcccggggatcgcagtggtgagtaaccatgcatcatcaggagtacggataaaatgcttgatggtcggaagaggcataaattccgtcagccagtttagtctgaccatctcatctgtaacatcattggcaacgctacctttgccatgtttcagaaacaactctggcgcatcgggcttcccatacaatcgatagattgtcgcacctgattgcccgacattatcgcgagcccatttatacccatataaatcagcatccatgttggaatttaatcgcggcctcgagcaagacgtttcccgttgaatatggctcataacaccccttgtattactgtttatgtaagcagacagttttattgttcatgatgatatatttttatcttgtgcaatgtaacatcagagattttgagacacaacgtggctttgttgaataaatcgaacttttgctgagttgaaggatcagatcacgcatcttcccgacaacgcagaccgttccgtggcaaagcaaaagttcaaaatcaccaactggtccacctacaacaaagctctcatcaaccgtggctccctcactttctggctggatgatggggcgattcaggcctggtatgagtcagcaacaccttcttcacgaggcagacctcagcgc

SEQ ID NO: 1212 - DNA, 5519 bp, Artificial Sequence
  Description of Artificial Sequence: Synthetic polynucleotide
agcgcccaatacgcaaaccgcctctccccgcgcgttggccgattcattaatgcagctggcacgacaggtttcccgactggaaagcgggcagtgagcgcaacgcaattaatgtgagttagctcactcattaggcaccccaggctttacactttatgcttccggctcgtatgttgtgtggaattgtgagcggataacaatttcacacaggaaacagctatgaccatgattacgccaagctatttaggtgacactatagaatactcaagctatgcatcaagcttggtaccgagctcggatccactagtaacggccgccagtgtgctggaattcgcccttttaagacccactttcacatttaagttgtttttctaatccgcagatgatcaattcaaggccgaataagaaggctggctctgcaccttggtgatcaaataattcgatagcttgtcgtaataatggcggcatactatcagtagtaggtgtttccctttcttctttagcgacttgatgctcttgatcttccaatacgcaacctaaagtaaaatgccccacagcgctgagtgcatataatgcattctctagtgaaaaaccttgttggcataaaaaggctaattgattttcgagagtttcatactgtttttctgtaggccgtgtacctaaatgtacttttgctccatcgcgatgacttagtaaagcacatctaaaacttttagcgttattacgtaaaaaatcttgccagctttccccttctaaagggcaaaagtgagtatggtgcctatctaacatctcaatggctaaggcgtcgagcaaagcccgcttattttttacatgccaatacaatgtaggctgctctacacctagcttctgggcgagtttacgggttgttaaaccttcgattccgacctcattaagcagctctaatgcgctgttaatcactttacttttatctaatctagacatcattaattcctaatttttgttgacactctatcattgatagagttattttaccactccctatcagtgatagagaaaatgaaaggaggtaaattatgagcaacaatgccttgcagactattattaacgctcgtcttcccggcgaagaaggtctgtggcaaatccatcttcaggatggtaagatttctgccattgatgcccaaagcggggtgatgccaatcacggaaaattcactggatgcagaacagggcttggtaattccgccttttgtagaaccacacatccatttggatactacccagacggcgggtcaacccaactggaaccagagcggtacgcttttcgaagggatcgagcgctgggccgaacgtaaagctcttttgacacatgacgacgtaaagcaacgcgcgtggcagacactgaaatggcaaattgccaatgggattcagcatgtacgcacgcacgtggacgttagcgacgcgaccctgaccgcattaaaggccatgttggaagtgaagcaagaagtggccccttggatcgatctgcaaattgtagcttttccacaagagggtatccttagctacccgaacggagaagctcttttagaggaagcgctgcgcttgggcgctgacgttgtcggtgctattcctcactttgagtttacacgcgagtatggagttgagtcgcttcataagacgttcgctttggcccagaaatacgaccgtttaattgacgtacattgcgatgagatcgacgacgagcaatcccgctttgtagaaacagtcgccgcgttggcgcatcacgaaggcatgggtgcgcgcgtaaccgcctcgcacactactgctatgcactcgtacaacggagcgtatactagccgcctgtttcgcttgctgaaaatgagtggcattaactttgttgccaacccattggtcaatatccatttgcaaggtcgtttcgatacatatccaaaacgtcgtggcatcacccgtgtcaaagagatgctggagtctggcattaatgtgtgttttggacatgacgatgtattcgatccatggtatccgcttggcacggctaacatgttacaagtgttgcacatggggttgcatgtgtgccagttaatgggctacggtcagatcaatgatggcttaaacttaatcacacaccactccgcgcgcactctgaatttgcaagactacggcatcgcagcaggtaactcggccaacctgatcatcttacccgcagaaaacggctttgatgctttgcgccgtcaggtgccggtccgctatagtgtgcgtggtgggaaggttatcgcgtccacccaaccagcacagaccactgtgtaccttgaacagcccgaagctatcgactacaaacgctaaaagggcgaattctgcagatatccatcacactggcggccgctcgagcatgcatctagagggcccaattcgccctatagtgagtcgtattacaattcactggccgtcgttttacaacgtcgtgactgggaaaaccctggcgttacccaacttaatcgccttgcagcacatccccctttcgccagctggcgtaatagcgaagaggcccgcaccgatcgcccttcccaacagttgcgcagcctatacgtacggcagtttaaggtttacacctataaaagagagagccgttatcgtctgtttgtggatgtacagagtgatattattgacacgccggggcgacggatggtgatccccctggccagtgcacgtctgctgtcagataaagtctcccgtgaactttacccggtggtgcatatcggggatgaaagctggcgcatgatgaccaccgatatggccagtgtgccggtctccgttatcggggaagaagtggctgatctcagccaccgcgaaaatgacatcaaaaacgccattaacctgatgttctggggaatataaatgtcaggcatgagattatcaaaaaggatcttcacctagatccttttcacgtagaaagccagtccgcagaaacggtgctgaccccggatgaatgtcagctactgggctatctggacaagggaaaacgcaagcgcaaagagaaagcaggtagcttgcagtgggcttacatggcgatagctagactgggcggttttatggacagcaagcgaaccggaattgccagctggggcgccctctggtaaggttgggaagccctgcaaagtaaactggatggctttctcgccgccaaggatctgatggcgcaggggatcaagctctgatcaagagacaggatgaggatcgtttcgcatgattgaacaagatggattgcacgcaggttctccggccgcttgggtggagaggctattcggctatgactgggcacaacagacaatcggctgctctgatgccgccgtgttccggctgtcagcgcaggggcgcccggttctttttgtcaagaccgacctgtccggtgccctgaatgaactgcaagacgaggcagcgcggctatcgtggctggccacgacgggcgttccttgcgcagctgtgctcgacgttgtcactgaagcgggaagggactggctgctattgggcgaagtgccggggcaggatctcctgtcatctcaccttgctcctgccgagaaagtatccatcatggctgatgcaatgcggcggctgcatacgcttgatccggctacctgcccattcgaccaccaagcgaaacatcgcatcgagcgagcacgtactcggatggaagccggtcttgtcgatcaggatgatctggacgaagagcatcaggggctcgcgccagccgaactgttcgccaggctcaaggcgagcatgcccgacggcgaggatctcgtcgtgacccatggcgatgcctgcttgccgaatatcatggtggaaaatggccgcttttctggattcatcgactgtggccggctgggtgtggcggaccgctatcaggacatagcgttggctacccgtgatattgctgaagagcttggcggcgaatgggctgaccgcttcctcgtgctttacggtatcgccgctcccgattcgcagcgcatcgccttctatcgccttcttgacgagttcttctgaattattaacgcttacaatttcctgatgcggtattttctccttacgcatctgtgcggtatttcacaccgcatacaggtggcacttttcggggaaatgtgcgcggaacccctatttgtttatttttctaaatacattcaaatatgtatccgctcatgagacaataaccctgataaatgcttcaataatagcacgtgaggagggccaccatggccaagttgaccagtgccgttccggtgctcaccgcgcgcgacgtcgccggagcggtcgagttctggaccgaccggctcgggttctcccgggacttcgtggaggacgacttcgccggtgtggtccgggacgacgtgaccctgttcatcagcgcggtccaggaccaggtggtgccggacaacaccctggcctgggtgtgggtgcgcggcctggacgagctgtacgccgagtggtcggaggtcgtgtccacgaacttccgggacgcctccgggccggccatgaccgagatcggcgagcagccgtgggggcgggagttcgccctgcgcgacccggccggcaactgcgtgcacttcgtggccgaggagcaggactgacacgtgctaaaacttcatttttaatttaaaaggatctaggtgaagatcctttttgataatctcatgaccaaaatcccttaacgtgagttttcgttccactgagcgtcagaccccgtagaaaagatcaaaggatcttcttgagatcctttttttctgcgcgtaatctgctgcttgcaaacaaaaaaaccaccgctaccagcggtggtttgtttgccggatcaagagctaccaactctttttccgaaggtaactggcttcagcagagcgcagataccaaatactgtccttctagtgtagccgtagttaggccaccacttcaagaactctgtagcaccgcctacatacctcgctctgctaatcctgttaccagtggctgctgccagtggcgataagtcgtgtcttaccgggttggactcaagacgatagttaccggataaggcgcagcggtcgggctgaacggggggttcgtgcacacagcccagcttggagcgaacgacctacaccgaactgagatacctacagcgtgagctatgagaaagcgccacgcttcccgaagggagaaaggcggacaggtatccggtaagcggcagggtcggaacaggagagcgcacgagggagcttccagggggaaacgcctggtatctttatagtcctgtcgggtttcgccacctctgacttgagcgtcgatttttgtgatgctcgtcaggggggcggagcctatggaaaaacgccagcaacgcggcctttttacggttcctgggcttttgctggccttttgctcacatgttctttcctgcgttatcccctgattctgtggataaccgtattaccgcctttgagtgagctgataccgctcgccgcagccgaacgaccgagcgcagcgagtcagtgagcgaggaagcggaag

SEQ ID NO: 1213 - DNA, 1281 bp, Artificial Sequence
  Description of Artificial Sequence: Synthetic polynucleotide
atgagcaacaatgccttgcagactattattaacgctcgtcttcccggcgaagaaggtctgtggcaaatccatcttcaggatggtaagatttctgccattgatgcccaaagcggggtgatgccaatcacggaaaattcactggatgcagaacagggcttggtaattccgccttttgtagaaccacacatccatttggatactacccagacggcgggtcaacccaactggaaccagagcggtacgcttttcgaagggatcgagcgctgggccgaacgtaaagctcttttgacacatgacgacgtaaagcaacgcgcgtggcagacactgaaatggcaaattgccaatgggattcagcatgtacgcacgcacgtggacgttagcgacgcgaccctgaccgcattaaaggccatgttggaagtgaagcaagaagtggccccttggatcgatctgcaaattgtagcttttccacaagagggtatccttagctacccgaacggagaagctcttttagaggaagcgctgcgcttgggcgctgacgttgtcggtgctattcctcactttgagtttacacgcgagtatggagttgagtcgcttcataagacgttcgctttggcccagaaatacgaccgtttaattgacgtacattgcgatgagatcgacgacgagcaatcccgctttgtagaaacagtcgccgcgttggcgcatcacgaaggcatgggtgcgcgcgtaaccgcctcgcacactactgctatgcactcgtacaacggagcgtatactagccgcctgtttcgcttgctgaaaatgagtggcattaactttgttgccaacccattggtcaatatccatttgcaaggtcgtttcgatacatatccaaaacgtcgtggcatcacccgtgtcaaagagatgctggagtctggcattaatgtgtgttttggacatgacgatgtattcgatccatggtatccgcttggcacggctaacatgttacaagtgttgcacatggggttgcatgtgtgccagttaatgggctacggtcagatcaatgatggcttaaacttaatcacacaccactccgcgcgcactctgaatttgcaagactacggcatcgcagcaggtaactcggccaacctgatcatcttacccgcagaaaacggctttgatgctttgcgccgtcaggtgccggtccgctatagtgtgcgtggtgggaaggttatcgcgtccacccaaccagcacagaccactgtgtaccttgaacagcccgaagctatcgactacaaacgc

SEQ ID NO: 1214 - DNA, 4894 bp, Artificial Sequence
  Description of Artificial Sequence: Synthetic polynucleotide
tagcggagtgtatactggcttactatgttggcactgatgagggtgtcagtgaagtgcttcatgtggcaggagaaaaaaggctgcaccggtgcgtcagcagaatatgtgatacaggatatattccgcttcctcgctcactgactcgctacgctcggtcgttcgactgcggcgagcggaaatggcttacgaacggggcggagatttcctggaagatgccaggaagatacttaacagggaagtgagagggccgcggcaaagccgtttttccataggctccgcccccctgacaagcatcacgaaatctgacgctcaaatcagtggtggcgaaacccgacaggactataaagataccaggcgtttcccctggcggctccctcgtgcgctctcctgttcctgcctttcggtttaccggtgtcattccgctgttatggccgcgtttgtctcattccacgcctgacactcagttccgggtaggcagttcgctccaagctggactgtatgcacgaaccccccgttcagtccgaccgctgcgccttatccggtaactatcgtcttgagtccaacccggaaagacatgcaaaagcaccactggcagcagccactggtaattgatttagaggagttagtcttgaagtcatgcgccggttaaggctaaactgaaaggacaagttttggtgactgcgctcctccaagccagttacctcggttcaaagagttggtagctcagagaaccttcgaaaaaccgccctgcaaggcggttttttcgttttcagagcaagagattacgcgcagaccaaaacgatctcaagaagatcatcttattaaggggtctgacgctcagtggaacggtgcaccctgcagggctagctgataaagcgttcgcgctgcattcggcagtttaagacccactttcacatttaagttgtttttctaatccgcatatgatcaattcaaggccgaataagaaggctggctctgcaccttggtgatcaaataattcgatagcttgtcgtaataatggcggcatactatcagtagtaggtgtttccctttcttctttagcgacttgatgctcttgatcttccaatacgcaacctaaagtaaaatgccccacagcgctgagtgcatataatgcattctctagtgaaaaaccttgttggcataaaaaggctaattgattttcgagagtttcatactgtttttctgtaggccgtgtacctaaatgtacttttgctccatcgcgatgacttagtaaagcacatctaaaacttttagcgttattacgtaaaaaatcttgccagctttccccttctaaagggcaaaagtgagtatggtgcctatctaacatctcaatggctaaggcgtcgagcaaagcccgcttattttttacatgccaatacaatgtaggctgctctacacctagcttctgggcgagtttacgggttgttaaaccttcgattccgacctcattaagcagctctaatgcgctgttaatcactttacttttatctaatctagacatcattaattcctaatttttgttgacactctatcattgatagagttattttaccactccctatcagtgatagagaaaagtgaacttcacttattagggaggaaagaatatgtcaaataacgctctgcagactattataaatgctcgattgccaggggaagaggggttgtggcaaattcaccttcaggatgggaagatctctgcgatagatgcgcagtcgggcgtgatgccaatcactgaaaactctctcgacgcggaacagggcctggttattcctccgtttgttgagccacacattcaccttgatactacgcagacggcaggtcagcccaattggaatcagtctggtaccttgtttgaggggatagagcggtgggccgaacgtaaggcattgctgacccacgatgatgtcaaacagcgcgcttggcagactttaaagtggcaaattgcgaatggcatccagcatgttagaacacacgtggatgtgtcggatgctactctgacggctctgaaagcgatgcttgaagttaagcaggaggttgccccgtggatcgatctgcaaattgttgcattcccgcaggagggcatcctcagctatccgaacggtgaggcgcttctcgaagaagctctcagacttggagcggacgttgtgggcgcgatcccgcatttcgaattcactcgcgagtacggtgtggaatcacttcacaaaacctttgcgctggcacagaagtatgaccgacttattgatgtacattgcgatgaaatagatgatgagcagtccagattcgttgaaaccgttgcagcgttggctcatcacgagggcatgggcgcacgcgtcactgcctcccacacgaccgcgatgcattcgtataacggtgcatacacctcacgcctgtttcggctgttaaaaatgagcggaataaacttcgtcgctaatccattggttaatattcatttgcagggtcgctttgatacgtatccaaaaagacgcggcataacgcgagtcaaagaaatgctggagagtggtatcaatgtgtgctttggccacgatgatgttttcgatccctggtatccgcttggaacggcgaatatgcttcaggttctgcacatggggctgcacgtgtgccagctgatgggttacggacaaattaacgatggcctgaatctcatcacccatcattctgcccgaactcttaacctgcaggattatggaattgcggcgggcaattctgctaatctgataatactgcctgctgaaaacggtttcgacgcgctccgccgacaagtgcccgttcgttacagtgttcgaggcggcaaagtcatcgcgtcaactcaaccagctcaaactactgtatatctggaacagcccgaagctattgactacaaacgaggctcagattataaggacgatgatgataaaggtagcaaaatagttgaagttaaacatcccctcgttaaacacaaactgggcttgatgcgcgaacaggacatatcgaccaaacgcttccgtgaactggcttcagaagtgggctcactactgacgtatgaagcaaccgcagatcttgagacagaaaaagtaactattgaaggctggaatggccccgtagagatagatcagatcaaaggtaaaaaaattacggtcgttccgattttgcgcgccgggctgggcatgatggatggagtgttagaaaacgtcccatccgcccggatctcggtggtcggaatgtaccgcaacgaagagacgcttgaaccagtcccttacttccagaagttggttagtaacatagacgaacgaatggccttaatagtagatccgatgctcgcgactggcggcagcgtgatcgctacgattgatctgttgaaaaaagcggggtgtagttctatcaaagttctggttctcgtcgcggcgccagaaggtattgccgcgttagaaaaagcacatccggacgtcgaactgtacactgcatctattgaccagggattgaacgagcatggatatataattccgggcttgggcgatgcgggagataaaatcttcggtactaagtaaggaggaacgattggtaaacccggtgaacgcatgagaaagcccccggaagatcaccttccgggggcttttttattgcgcggaccaaaacgaaaaaagacgctcgaaagcgtctcttttctggaatttggtaccgaggcgtaatgctctgccagtgttacaaccaattaaccaattctgattagaaaaactcatcgagcatcaaatgaaactgcaatttattcatatcaggattatcaataccatatttttgaaaaagccgtttctgtaatgaaggagaaaactcaccgaggcagttccataggatggcaagatcctggtatcggtctgcgattccgactcgtccaacatcaatacaacctattaatttcccctcgtcaaaaataaggttatcaagtgagaaatcaccatgagtgacgactgaatccggtgagaatggcaaaagcttatgcatttctttccagacttgttcaacaggccagccattacgctcgtcatcaaaatcactcgcatcaaccaaaccgttattcattcgtgattgcgcctgagcgagacgaaatacgcgatcgctgttaaaaggacaattacaaacaggaatcgaatgcaaccggcgcaggaacactgccagcgcatcaacaatattttcacctgaatcaggatattcttctaatacctggaatgctgttttcccggggatcgcagtggtgagtaaccatgcatcatcaggagtacggataaaatgcttgatggtcggaagaggcataaattccgtcagccagtttagtctgaccatctcatctgtaacatcattggcaacgctacctttgccatgtttcagaaacaactctggcgcatcgggcttcccatacaatcgatagattgtcgcacctgattgcccgacattatcgcgagcccatttatacccatataaatcagcatccatgttggaatttaatcgcggcctcgagcaagacgtttcccgttgaatatggctcataacaccccttgtattactgtttatgtaagcagacagttttattgttcatgatgatatatttttatcttgtgcaatgtaacatcagagattttgagacacaacgtggctttgttgaataaatcgaacttttgctgagttgaaggatcagatcacgcatcttcccgacaacgcagaccgttccgtggcaaagcaaaagttcaaaatcaccaactggtccacctacaacaaagctctcatcaaccgtggctccctcactttctggctggatgatggggcgattcaggcctggtatgagtcagcaacaccttcttcacgaggcagacctcagcgc

SEQ ID NO: 1215 - DNA, 1941 bp, Artificial Sequence
  Description of Artificial Sequence: Synthetic polynucleotide
atgtcaaataacgctctgcagactattataaatgctcgattgccaggggaagaggggttgtggcaaattcaccttcaggatgggaagatctctgcgatagatgcgcagtcgggcgtgatgccaatcactgaaaactctctcgacgcggaacagggcctggttattcctccgtttgttgagccacacattcaccttgatactacgcagacggcaggtcagcccaattggaatcagtctggtaccttgtttgaggggatagagcggtgggccgaacgtaaggcattgctgacccacgatgatgtcaaacagcgcgcttggcagactttaaagtggcaaattgcgaatggcatccagcatgttagaacacacgtggatgtgtcggatgctactctgacggctctgaaagcgatgcttgaagttaagcaggaggttgccccgtggatcgatctgcaaattgttgcattcccgcaggagggcatcctcagctatccgaacggtgaggcgcttctcgaagaagctctcagacttggagcggacgttgtgggcgcgatcccgcatttcgaattcactcgcgagtacggtgtggaatcacttcacaaaacctttgcgctggcacagaagtatgaccgacttattgatgtacattgcgatgaaatagatgatgagcagtccagattcgttgaaaccgttgcagcgttggctcatcacgagggcatgggcgcacgcgtcactgcctcccacacgaccgcgatgcattcgtataacggtgcatacacctcacgcctgtttcggctgttaaaaatgagcggaataaacttcgtcgctaatccattggttaatattcatttgcagggtcgctttgatacgtatccaaaaagacgcggcataacgcgagtcaaagaaatgctggagagtggtatcaatgtgtgctttggccacgatgatgttttcgatccctggtatccgcttggaacggcgaatatgcttcaggttctgcacatggggctgcacgtgtgccagctgatgggttacggacaaattaacgatggcctgaatctcatcacccatcattctgcccgaactcttaacctgcaggattatggaattgcggcgggcaattctgctaatctgataatactgcctgctgaaaacggtttcgacgcgctccgccgacaagtgcccgttcgttacagtgttcgaggcggcaaagtcatcgcgtcaactcaaccagctcaaactactgtatatctggaacagcccgaagctattgactacaaacgaggctcagattataaggacgatgatgataaaggtagcaaaatagttgaagttaaacatcccctcgttaaacacaaactgggcttgatgcgcgaacaggacatatcgaccaaacgcttccgtgaactggcttcagaagtgggctcactactgacgtatgaagcaaccgcagatcttgagacagaaaaagtaactattgaaggctggaatggccccgtagagatagatcagatcaaaggtaaaaaaattacggtcgttccgattttgcgcgccgggctgggcatgatggatggagtgttagaaaacgtcccatccgcccggatctcggtggtcggaatgtaccgcaacgaagagacgcttgaaccagtcccttacttccagaagttggttagtaacatagacgaacgaatggccttaatagtagatccgatgctcgcgactggcggcagcgtgatcgctacgattgatctgttgaaaaaagcggggtgtagttctatcaaagttctggttctcgtcgcggcgccagaaggtattgccgcgttagaaaaagcacatccggacgtcgaactgtacactgcatctattgaccagggattgaacgagcatggatatataattccgggcttgggcgatgcgggagataaaatcttcggtactaagtaa

SEQ ID NO: 1216 - protein, 427 aa, Artificial Sequence
  Description of Artificial Sequence: Synthetic polypeptide
MSNNALQTIINARLPGEEGLWQIHLQDGKISAIDAQSGVMPITENSLDAEQGLVIPPFVEPHIHLDTTQTAGQPNWNQSGTLFEGIERWAERKALLTHDDVKQRAWQTLKWQIANGIQHVRTHVDVSDATLTALKAMLEVKQEVAPWIDLQIVAFPQEGILSYPNGEALLEEALRLGADVVGAIPHFEFTREYGVESLHKTFALAQKYDRLIDVHCDEIDDEQSRFVETVAALAHHEGMGARVTASHTTAMHSYNGAYTSRLFRLLKMSGINFVANPLVNIHLQGRFDTYPKRRGITRVKEMLESGINVCFGHDDVFDPWYPLGTANMLQVLHMGLHVCQLMGYGQINDGLNLITHHSARTLNLQDYGIAAGNSANLIILPAENGFDALRRQVPVRYSVRGGKVIASTQPAQTTVYLEQPEAIDYKR

SEQ ID NO: 1217 - protein, 646 aa, Artificial Sequence
  Description of Artificial Sequence: Synthetic polypeptide
MSNNALQTIINARLPGEEGLWQIHLQDGKISAIDAQSGVMPITENSLDAEQGLVIPPFVEPHIHLDTTQTAGQPNWNQSGTLFEGIERWAERKALLTHDDVKQRAWQTLKWQIANGIQHVRTHVDVSDATLTALKAMLEVKQEVAPWIDLQIVAFPQEGILSYPNGEALLEEALRLGADVVGAIPHFEFTREYGVESLHKTFALAQKYDRLIDVHCDEIDDEQSRFVETVAALAHHEGMGARVTASHTTAMHSYNGAYTSRLFRLLKMSGINFVANPLVNIHLQGRFDTYPKRRGITRVKEMLESGINVCFGHDDVFDPWYPLGTANMLQVLHMGLHVCQLMGYGQINDGLNLITHHSARTLNLQDYGIAAGNSANLIILPAENGFDALRRQVPVRYSVRGGKVIASTQPAQTTVYLEQPEAIDYKRGSDYKDDDDKGSKIVEVKHPLVKHKLGLMREQDISTKRFRELASEVGSLLTYEATADLETEKVTIEGWNGPVEIDQIKGKKITVVPILRAGLGMMDGVLENVPSARISVVGMYRNEETLEPVPYFQKLVSNIDERMALIVDPMLATGGSVIATIDLLKKAGCSSIKVLVLVAAPEGIAALEKAHPDVELYTASIDQGLNEHGYIIPGLGDAGDKIFGTK

SEQ ID NO: 1218 - protein, 52 aa, Artificial Sequence
  Description of Artificial Sequence: Synthetic polypeptide
MKRHLNTSYRLVWNHITGAFVVASELARARGKRAGVAVALSLAAATSLPALA

SEQ ID NO: 1219 - protein, 53 aa, Artificial Sequence
  Description of Artificial Sequence: Synthetic polypeptide
MNKIFKVIWNPATGSYTVASETAKSRGKKSGRSKLLISALVAGGLLSSFGASA

SEQ ID NO: 1220 - protein, 22 aa, Artificial Sequence
  Description of Artificial Sequence: Synthetic peptide
MQLRKPATAILALALSAGLAQA

SEQ ID NO: 1221 - protein, 40 aa, Artificial Sequence
  Description of Artificial Sequence: Synthetic polypeptide
MFWRDMTLSVWRKKTTGLKTKKRLLALVLAAALCSSPVWA

SEQ ID NO: 1222 - DNA, 159 bp, Artificial Sequence
  Description of Artificial Sequence: Synthetic polynucleotide
atgaacaagattttcaaggttatctggaaccccgcgacaggcagctacactgtggcctccgaaaccgctaagtcgcgcggcaagaagtcaggacgttcaaagctgcttatttctgctttagtagccggaggattactttctagctttggagcctcggca

SEQ ID NO: 1223 - DNA, 57 bp, Artificial Sequence
  Description of Artificial Sequence: Synthetic oligonucleotide
atgaaaaaaatctggctggcattagcaggcttagtcctggcctttagtgcctcggca

SEQ ID NO: 1224 - DNA, 66 bp, Artificial Sequence
  Description of Artificial Sequence: Synthetic oligonucleotide
atgcagttgcgcaagcctgccacggcaattttagcattagctctttctgcgggcttggcccaggca

SEQ ID NO: 1225 - DNA, 120 bp, Artificial Sequence
  Description of Artificial Sequence: Synthetic polynucleotide
atgttctggcgcgacatgacactgagcgtttggcgtaaaaaaacaacgggactgaaaaccaaaaagcgtttgttagcccttgtcctggcggcagccctgtgctcgtccccggtatgggca

SEQ ID NO: 1226 - DNA, 99 bp, Artificial Sequence
  Description of Artificial Sequence: Synthetic oligonucleotide
atgggatacaagatgaacatttcatcacttcgcaaagcttttatcttcatgggtgccgttgctgctctgtcactggtcaatgctcaatcggccctggca

SEQ ID NO: 1227 - DNA, 78 bp, Artificial Sequence
  Description of Artificial Sequence: Synthetic oligonucleotide
atgaagattaaaacaggcgctcgtattttggccctgtctgcgcttacgactatgatgtttagtgcctcggccctggca

SEQ ID NO: 1228 - DNA, 78 bp, Artificial Sequence
  Description of Artificial Sequence: Synthetic oligonucleotide
atgacgaatatcactaaacgtagccttgtggccgcgggggtcttggctgcattgatggctggcaatgttgctctggca

SEQ ID NO: 1229 - DNA, 66 bp, Artificial Sequence
  Description of Artificial Sequence: Synthetic oligonucleotide
atgaaatatctgttgcccacggctgccgcgggtctgctgctgctggcagcgcaaccggctatggca

SEQ ID NO: 1230 - DNA, 63 bp, Artificial Sequence
  Description of Artificial Sequence: Synthetic oligonucleotide
atgaagcaaagtacgatcgcccttgcgctgttgccccttcttttcacgcccgtcaccaaggca

SEQ ID NO: 1231 - protein, 343 aa, Homo sapiens
EEELQVIQPDKSVLVAAGETATLRCTATSLIPVGPIQWFRGAGPGRELIYNQKEGHFPRVTTVSDLTKRNNMDFSIRIGNITPADAGTYYCVKFRKGSPDDVEFKSGAGTELSVRAKPSAPVVSGPAARATPQHTVSFTCESHGFSPRDITLKWFKNGNELSDFQTNVDPVGESVSYSIHSTAKVVLTREDVHSQVICEVAHVTLQGDPLRGTANLSETIRVPPTLEVTQQPVRAENQVNVTCQVRKFYPQRLQLTWLENGNVSRTETASTVTENKDGTYNWMSWLLVNVSAHRDDVKLTCQVEHDGQPAVSKSHDLKVSAHPKEQGSNTAAENTGSNERNIY

SEQ ID NO: 1232 - DNA, 342 bp, Artificial Sequence
  Description of Artificial Sequence: Synthetic polynucleotide
aactgggtgaatgtcatctcggacttaaagaagattgaagacttgattcagagcatgcatatcgacgcgactttatacaccgagtctgacgtacacccaagttgcaaggtcaccgccatgaagtgcttcttgcttgagttacaagtcatcagtttggaatctggagacgctagtattcacgatacggtggaaaacctgatcatccttgcaaatgactctctttcatccaatggtaatgttactgagtcggggtgcaaagaatgtgaagaacttgaggagaagaacattaaggaatttcttcagtcattcgtgcatatcgtacagatgttcatcaacacctct

SEQ ID NO: 1233 - DNA, 60 bp, Artificial Sequence
  Description of Artificial Sequence: Synthetic oligonucleotide
tccggagggagcggcggcgggggtagtggaggcgggtcaggcggcgggggctcacttcag

SEQ ID NO: 1234 - DNA, 36 bp, Artificial Sequence
  Description of Artificial Sequence: Synthetic oligonucleotide
gattataaagacgatgacgataagatcgaaggacgt

SEQ ID NO: 1235 - DNA, 1791 bp, Artificial Sequence
  Description of Artificial Sequence: Synthetic polynucleotide
atggggtacaaaatgaacattagctcgcttcgcaaagcattcatttttatgggggctgttgcagctttaagccttgtcaatgcccagtcagcgcttgccgtcgactataaggatgacgacgacaagcaattgggcggtggcatctgggagcttaagaaggacgtgtatgtagtggagttagactggtatccagatgcccccggagagatggtggtcttaacatgtgacactccagaggaggacgggattacctggacacttgaccagtcaagcgaggtattgggttctggaaagacgcttactattcaagtcaaagaatttggggatgccgggcagtatacatgtcacaagggcggcgaagttctgtcgcactccttacttttgttacacaaaaaagaagacggcatttggtccacagacatccttaaggaccaaaaggagccgaagaataagacgtttctgcgctgtgaagcgaagaactatagtggtcgctttacttgctggtggttgacgaccatttccactgatttaaccttttcggtaaagagttctcgcgggagttccgacccacagggcgtgacttgtggcgcagccacactttcggcggaacgcgttcgtggggacaataaggaatacgaatattcggtcgagtgtcaggaagattcagcttgccctgccgctgaggagtcacttccgattgaagtgatggttgacgccgtgcacaaattaaagtatgaaaattacacgtcatctttctttatccgtgacattattaagcccgacccgccaaagaatctgcagcttaaacccctgaagaacagccgccaggtggaagtaagctgggaatatcctgacacctggtccactccgcattcgtatttctcgttgacgttttgtgttcaggtgcagggaaagagcaagcgcgaaaagaaggatcgcgtctttacagacaaaacgtccgcgacggttatttgtcgtaagaatgctagtatctctgttcgcgctcaggaccgttattactcatctagttggtcggagtgggcctcggttccctgctctgggggtggaggatcgggtggaggtggctcgggaggtggcggctcccgtaatttaccggtggctactcctgacccagggatgttcccgtgcttgcaccatagccaaaacttacttcgcgctgtcagcaacatgcttcagaaagcacgtcaaacgcttgagttttacccgtgtactagcgaagagatcgatcacgaggacattaccaaagacaaaacctccaccgtcgaggcctgccttccacttgaactgacgaaaaatgagtcatgcttaaattctcgtgaaacctccttcattactaacggatcgtgcctggcctcgcgcaagacttcgttcatgatggcattatgcttgtcgtctatttatgaagaccttaaaatgtatcaagtggagttcaagacgatgaatgcaaaacttcttatggacccgaagcgtcaaatcttcttagaccaaaacatgttggccgtgatcgatgaactgatgcaagccttgaattttaattcggaaactgtaccgcaaaaatcttctcttgaagaaccggatttctataagaccaaaattaaactttgtattttacttcacgctttccgcatccgtgcagtaactatcgaccgcgtaatgagttaccttaacgcctcgggtggcgagctcggtggcagtggtaagcctatccctaaccctctcctcggcctcgattctacgggatccggtcatcaccaccatcaccatcaccat

SEQ ID NO: 1236 - protein, 69 aa, Artificial Sequence
  Description of Artificial Sequence: Synthetic polypeptide
ITCPPPMSVEHADIWVKSYSLYSRERYICNSGFKRKAGTSSLTECVLNKATNVAHWTTPSLKCIRDPAL

SEQ ID NO: 1237 - DNA, 72 bp, Artificial Sequence; identical to SEQ ID NO: 1141
  Description of Artificial Sequence: Synthetic oligonucleotide

SEQ ID NO: 1238 - protein, 18 aa, Artificial Sequence
  Description of Artificial Sequence: Synthetic peptide
KESGSVSSEQLAQFRSLD

SEQ ID NO: 1239 - protein, 14 aa, Artificial Sequence
  Description of Artificial Sequence: Synthetic peptide
EGKSSGSGSESKST

SEQ ID NO: 1240 - protein, 8 aa, Artificial Sequence
  Description of Artificial Sequence: Synthetic peptide
GGGGGGGG

SEQ ID NO: 1241 - protein, 12 aa, Artificial Sequence
  Description of Artificial Sequence: Synthetic peptide
GSAGSAAGSGEF

SEQ ID NO: 1242 - protein, 30 aa, Artificial Sequence
  Description of Artificial Sequence: Synthetic polypeptide
  SITE (1)..(30): This sequence may encompass 1-6 "Gly Gly Gly Gly Ser" repeating units
GGGGSGGGGSGGGGSGGGGSGGGGSGGGGS

SEQ ID NO: 1243 - protein, 16 aa, Artificial Sequence
  Description of Artificial Sequence: Synthetic peptide
SGGGGSGGGGSGGGGS

SEQ ID NO: 1244 - protein, 9 aa, Artificial Sequence
  Description of Artificial Sequence: Synthetic peptide
GGGGSGGGS

SEQ ID NO: 1245 - protein, 5 aa, Artificial Sequence
  Description of Artificial Sequence: Synthetic peptide
GGGGS

SEQ ID NO: 1246 - DNA, 18 bp, Artificial Sequence
  Description of Artificial Sequence: Synthetic oligonucleotide
  modified_base (2)..(2): a, c, t, g, unknown or other
  modified_base (17)..(17): a, c, t, g, unknown or other
wntgaatwwwwattcanw

SEQ ID NO: 1247 - protein, 15 aa, Artificial Sequence
  Description of Artificial Sequence: Synthetic peptide
GGGGSGGGGSGGGGS

SEQ ID NO: 1248 - protein, 6 aa, Artificial Sequence
  Description of Artificial Sequence: Synthetic peptide
  MOD_RES (6)..(6): 1,3 dimethyl-His
CAVAYH

SEQ ID NO: 1249 - DNA, 18 bp, Artificial Sequence
  Description of Artificial Sequence: Synthetic oligonucleotide
ttgttgayryrtcaacwa

SEQ ID NO: 1250 - DNA, 24 bp, Artificial Sequence
  Description of Artificial Sequence: Synthetic oligonucleotide
ggaaaatttttttaaaaaaaaaac

SEQ ID NO: 1251 - protein, 8 aa, Artificial Sequence
  Description of Artificial Sequence: Synthetic peptide
AGYGSTLT

SEQ ID NO: 1252 - protein, 6 aa, Artificial Sequence
  Description of Artificial Sequence: Synthetic 6xHis tag
HHHHHH

SEQ ID NO: 1253 - DNA, 57 bp, Artificial Sequence
  Description of Artificial Sequence: Synthetic oligonucleotide
atgaagaaaatttggctggcacttgccggtttggtattagcgttttccgcctcggca

SEQ ID NO: 1254 - protein, 522 aa, Homo sapiens
MQPWHGKAMQRASEAGATAPKASARNARGAPMDPTESPAAPEAALPKAGKFGPARKSGSRQKKSAPDTQERPPVRATGARAKKAPQRAQDTQPSDATSAPGAEGLEPPAAREPALSRAGSCRQRGARCSTKPRPPPGPWDVPSPGLPVSAPILVRRDAAPGASKLRAVLEKLKLSRDDISTAAGMVKGVVDHLLLRLKCDSAFRGVGLLNTGSYYEHVKISAPNEFDVMFKLEVPRIQLEEYSNTRAYYFVKFKRNPKENPLSQFLEGEILSASKMLSKFRKIIKEEINDIKDTDVIMKRKRGGSPAVTLLISEKISVDITLALESKSSWPASTQEGLRIQNWLSAKVRKQLRLKPFYLVPKHAKEGNGFQEETWRLSFSHIEKEILNNHGKSKTCCENKEEKCCRKDCLKLMKYLLEQLKERFKDKKHLDKFSSYHVKTAFFHVCTQNPQDSQWDRKDLGLCFDNCVTYFLQCLRTEKLENYFIPEFNLFSSNLIDKRSKEFLTKQIEYERNNEFPVFDEF

SEQ ID NO: 1255 - DNA, 1569 bp, Homo sapiens
atgcaaccatggcatggtaaggcaatgcaacgtgcatctgaggctggagctaccgcgcccaaagcttcagcacggaacgcgcgcggtgctccgatggatccgacggagagccctgctgcaccggaagccgctctgccaaaagcgggtaaattcgggccggcgcggaaatcaggctcacgccagaaaaagagtgctccggatacacaggaacgtccgcctgtaagagctaccggcgcgcgcgctaaaaaagcccctcagcgtgcgcaggatacccaaccatcggatgcaacgagcgcaccgggggcggagggccttgagcctcctgctgcgcgtgagccggccctctctcgcgcagggagttgccgccaacgaggcgcacgctgctcgacgaaaccgcggccccctccgggtccgtgggatgttccatcgccaggcctgccggtttctgcgcctattctcgttcgccgcgacgcggctcctggcgcttcgaaactgagagctgtcttagagaaactgaaactctcgcgggatgatatatctactgcggcagggatggtcaaaggtgttgtggatcatctcctgttacgtcttaagtgcgattcggccttccgaggtgttggccttttaaacactgggtcatactatgagcacgttaagatcagcgcgccgaacgagttcgacgttatgtttaagcttgaagtccctcgcatacagctggaagaatactccaatacacgagcatattattttgttaaattcaaacgaaaccccaaagagaaccctctttcacagtttctggagggagaaattctgtctgcgagtaagatgctctcgaagttccgaaaaatcattaaagaggaaatcaacgacatcaaagacactgatgttatcatgaagaggaaacgtgggggctcaccggcggtaacactgctgatttcggaaaagatctcagttgatattactttggcgctcgaatcaaaatcatcgtggccggcgagtacacaggaagggctccgtattcagaattggctgtctgcgaaagtccgcaaacaactgcgtttgaaaccattttatttagtgccaaaacacgcgaaagaaggcaacggtttccaggaggagacgtggcgactgtcatttagccacatagaaaaggaaatattaaataatcacgggaaaagtaagacgtgctgcgagaataaagaagagaagtgctgcaggaaagattgtctgaaactgatgaaatacctgttggagcagctgaaagagaggtttaaagataagaagcatctggacaaattttcttcatatcacgttaaaaccgcattcttccacgtatgcacacagaatccgcaggactcacagtgggatcggaaagatctgggcctgtgctttgacaactgcgtcacatatttcttgcagtgcttgaggactgaaaaattggaaaactacttcattcccgagttcaatttattcagtagtaacctgatcgacaagcgtagcaaagaattcctgacgaagcagatcgaatacgaaagaaataacgaattcccggtgtttgatgaattttaa

SEQ ID NO: 1256 - DNA, 1594 bp, Artificial Sequence
  Description of Artificial Sequence: Synthetic polynucleotide
acctattggtataaggaggtaaataatgcaaccatggcatggtaaggcaatgcaacgtgcatctgaggctggagctaccgcgcccaaagcttcagcacggaacgcgcgcggtgctccgatggatccgacggagagccctgctgcaccggaagccgctctgccaaaagcgggtaaattcgggccggcgcggaaatcaggctcacgccagaaaaagagtgctccggatacacaggaacgtccgcctgtaagagctaccggcgcgcgcgctaaaaaagcccctcagcgtgcgcaggatacccaaccatcggatgcaacgagcgcaccgggggcggagggccttgagcctcctgctgcgcgtgagccggccctctctcgcgcagggagttgccgccaacgaggcgcacgctgctcgacgaaaccgcggccccctccgggtccgtgggatgttccatcgccaggcctgccggtttctgcgcctattctcgttcgccgcgacgcggctcctggcgcttcgaaactgagagctgtcttagagaaactgaaactctcgcgggatgatatatctactgcggcagggatggtcaaaggtgttgtggatcatctcctgttacgtcttaagtgcgattcggccttccgaggtgttggccttttaaacactgggtcatactatgagcacgttaagatcagcgcgccgaacgagttcgacgttatgtttaagcttgaagtccctcgcatacagctggaagaatactccaatacacgagcatattattttgttaaattcaaacgaaaccccaaagagaaccctctttcacagtttctggagggagaaattctgtctgcgagtaagatgctctcgaagttccgaaaaatcattaaagaggaaatcaacgacatcaaagacactgatgttatcatgaagaggaaacgtgggggctcaccggcggtaacactgctgatttcggaaaagatctcagttgatattactttggcgctcgaatcaaaatcatcgtggccggcgagtacacaggaagggctccgtattcagaattggctgtctgcgaaagtccgcaaacaactgcgtttgaaaccattttatttagtgccaaaacacgcgaaagaaggcaacggtttccaggaggagacgtggcgactgtcatttagccacatagaaaaggaaatattaaataatcacgggaaaagtaagacgtgctgcgagaataaagaagagaagtgctgcaggaaagattgtctgaaactgatgaaatacctgttggagcagctgaaagagaggtttaaagataagaagcatctggacaaattttcttcatatcacgttaaaaccgcattcttccacgtatgcacacagaatccgcaggactcacagtgggatcggaaagatctgggcctgtgctttgacaactgcgtcacatatttcttgcagtgcttgaggactgaaaaattggaaaactacttcattcccgagttcaatttattcagtagtaacctgatcgacaagcgtagcaaagaattcctgacgaagcagatcgaatacgaaagaaataacgaattcccggtgtttgatgaattttaa

SEQ ID NO: 1257 - protein, 273 aa, Listeria monocytogenes; identical to SEQ ID NO: 1209

SEQ ID NO: 1258 - DNA, 822 bp, Listeria monocytogenes; identical to SEQ ID NO: 1210

SEQ ID NO: 1259 - DNA, 3787 bp, Artificial Sequence; identical to SEQ ID NO: 1211
  Description of Artificial Sequence: Synthetic polynucleotide

SEQ ID NO: 1260 - protein, 403 aa, Kingella denitrificans
MSDYTNNLHRVFVDQKIGFKKKITPTEQDLNFFNQVKKDVKSHLKTKIKEFLEQQGIANIAPKFRIQGSWAYGTCNLPAKQDQEMDFDYGVYLPVRAFEGFNPDAGASEQAQNYFEQVELMVEDLCHQHKWQLDTSAPSSCIRIKIRSNAHMDIPLYAVPDDMFDSLEERNELQVSLGTTTAIDKSLNYSEWALEDFNIRSFAEESLMDKNIRMIHMARRDGTWQKSDCELIRKWFADKLKSLENNGQQLRAICRYLKAWRDWQFADKSFQPSSILLMIIACKYYQYHQHRDDLALLSVLEKLPNALNDNVYENIEEHESEDFNRMEEYERVEASQYADALYQSFMASLNNLDKTKVLNFITNEWGDRIPQDENLIETSPQSIFDTPPLAQSNITQQVPLRQG

SEQ ID NO: 1261 - protein, 403 aa, Neisseria bacilliformis
MSHYTNNLHRIFVDREIGFKKEITPTELDLDFFNNVKKVVKSHLKTKIKEFLEQQGLASITPKFRIQGSWAYGTCNLPAKQGQEMDFDYGVYLPVRAFDGFNPDAGASEQAKNYFEQVELMMGDLCEQHDWLLDTSAPSSCIRIKIRNNAHMDIPLYAVPDDMFDSLEERNELQVSLGSATAIHESLNYSKWVFEDFNIRSFAEESLMDKNIRMIHMARRDGTWQESDCELIRKWFADKLKSLENNGQQLRAICRYLKAWRDWQFADKSFQPSSILLMIIACKYYQYYQHRDDLALLSVLEKLPNALSGNVYENIEEHESEDFNRMKEGERVEAMQYADALYQNFMASLNNFDKTKALKFITNEWGNRIPQDEDLIETSRQAIFDTPPLVQPNITPQAPLRQG

SEQ ID NO: 1262 - protein, 468 aa, Verminephrobacter eiseniae
MGQASKLFNGNTDQTLIGRVTPTTEQREFLQQQWNDLADHLKQALAKHGYTISTWLQGSYKYATLIKPVHLGEEYDVDVGLYFEWNDDQDAEPTPKQLRDWVQAELLEYEKACEELKKVEVPPKERCSRASYIQQFHIDTPVYHLNTDSDVRRLACLSGKWEHSDPKKLYKWFKEAVSGDDRDQLRRLVRYLKAWAAVSFDDAPGSRPSSIFLTVIATEAYQDLWAQRLLGLADDDALLAVIKKMHDRLFDDRKVENPVDKNEDLNRMTAEAWDGFLPRLAALQDIAERAGDAKDEASAALIWSEAFSFLMPLPETDQVEIVDEGSGRAVMQLPEIEVKVCTGTPPRPVATYRNEVPGVAKDCMLSFAIVNPHVVPEFATVEWTVRNEGQEADQRSDLGHRRVGMRLLSVEEHTAYVGRHFMDCVVRLNGQVYAVRRVPVTIRDVQHVARNPPRPPYTKLRSLFRRRR

SEQ ID NO: 1263 - DNA, 1213 bp, Kingella denitrificans
atgtcagactacactaataacttgcatcgcgtctttgttgaccaaaaaattgggttcaagaagaaaatcactcctaccgagcaagatctgaactttttcaatcaggtcaagaaagatgtaaagtcccaccttaagaccaaaatcaaggaatttcttgagcaacagggaatcgcgaacattgctccgaagttccgtattcagggatcgtgggcttacgggacatgtaatttgcccgcaaaacaggaccaggagatggatttcgattacggggtatatctgccagtacgtgccttcgaggggttcaacccagacgcaggcgcgtctgagcaggctcaaaactattttgaacaggtcgagttgatggttgaagatctgtgccaccagcataaatggcagctggacacgtctgccccttcgtcctgtatccgcattaaaattcgcagcaacgctcatatggacattcctttatatgccgtcccggatgatatgttcgattctcttgaagagcgcaatgagttacaagtatcactgggcacgacaacggctatcgataagtcactgaattacagcgagtgggcactggaggactttaatatccgctcattcgccgaagaaagtttaatggataagaacattcgcatgatccacatggcgcgtcgtgacgggacttggcaaaagtcggattgcgagctgattcgcaaatggttcgcagacaaactgaagagcttggagaataacgggcaacagctgcgtgcgatctgtcgttaccttaaggcgtggcgcgattggcaattcgctgacaagtcgtttcaaccatcctctatcttgttaatgattatcgcgtgcaaatattatcaataccatcaacaccgtgacgatttagcacttttatccgtgcttgaaaagttgccaaacgctttaaacgataatgtttatgagaatattgaagaacacgaatccgaagactttaaccgtatggaagagtatgaacgcgttgaggcgtcgcagtatgccgacgcgttgtaccagagtttcatggcctccttaaacaatttggacaaaactaaggttttaaattttatcactaatgagtggggggatcgcattccacaagacgagaacttaatcgagacatctcctcaatcaattttcgatactccccccttggcacaaagcaatatcacgcaacaagtgcccttgcgccagggttaas

SEQ ID NO: 1264 - DNA, 1212 bp, Neisseria bacilliformis
atgtctcactacaccaataatcttcatcgtatcttcgtagatcgtgaaattggttttaagaaagagattactccgacagagctggatcttgacttcttcaacaacgtcaaaaaagtagttaagagccaccttaaaaccaaaatcaaggagtttcttgaacagcaagggctggcgagtattactcctaagtttcgtatccagggaagctgggcgtacggaacatgtaaccttccagccaagcagggtcaggaaatggacttcgattatggcgtttatcttcctgtccgcgcctttgatggatttaatcctgatgcaggtgcctcagaacaagctaagaattacttcgaacaggtggagcttatgatgggtgacctgtgcgagcagcatgactggttgttggacacatccgcgccctcttcgtgtattcgcatcaaaatccgcaataatgcccatatggacattcctttatatgcagttccagacgatatgttcgatagcctggaggaacgtaacgaattacaggtttccttgggatcagcgacagctattcacgaatcgctgaattattcaaagtgggtttttgaggattttaacatccgctcttttgctgaggaatccctgatggacaaaaatatccgcatgatccacatggcccgccgtgacggaacttggcaggagtctgattgtgagttgattcgcaaatggtttgctgacaagttgaaatcccttgagaataatggtcagcagcttcgtgcaatttgtcgctatcttaaagcctggcgcgattggcaattcgcagataagtcttttcaaccctccagtatcctgttgatgatcattgcgtgtaagtactatcagtactaccaacatcgtgacgacctggcactgctgtccgtgctggagaaattgcccaacgctttgtctgggaacgtctatgagaatattgaggaacatgagtctgaggactttaaccgtatgaaagagggcgagcgtgtagaagcaatgcaatatgcggacgcgttataccaaaacttcatggcgtctcttaacaattttgataaaacgaaggcgctgaaattcatcactaatgaatggggaaatcgtatcccacaagatgaagacttaatcgaaacgtctcgtcaggcaatttttgacacaccacccttagttcaacccaacatcactccacaggccccacttcgccaggggtaa

SEQ ID NO: 1265 - DNA, 1407 bp, Verminephrobacter eiseniae
atgggacaggcgtctaagttatttaatggtaatacagatcaaactttaattggccgcgtgacgcccactaccgaacaacgcgagtttttacaacagcagtggaatgatctggcagatcacttgaagcaagccctggcaaaacacggttatacaatttcgacatggcttcagggttcttacaaatacgcgactcttattaagcctgtgcatctgggtgaagagtatgacgtagatgtagggttgtactttgagtggaacgatgaccaggatgcggagcccacgcctaagcagctgcgtgattgggtgcaagcggagttgttagagtatgagaaggcttgtgaggaacttaagaaagttgaggtgccgccgaaagaacgctgttctcgcgcatcatacatccaacaatttcacattgacacaccagtttatcatctgaacacggactccgacgtgcgccgtcttgcttgccttagtggaaagtgggagcattctgatccgaaaaagttatacaagtggtttaaagaagcagtatccggggatgatcgtgaccaattacgccgtcttgtacgttacttaaaggcctgggctgcggtttcctttgatgacgcaccgggatcccgcccatctagcatttttcttacggttattgctactgaagcctatcaggacttgtgggcacaacgtttactgggattagctgacgatgacgctttgctggcagtgattaaaaagatgcacgaccgccttttcgatgaccgcaaggtcgagaatcccgtagataaaaacgaagacttaaatcgcatgacggctgaagcgtgggacggttttctgccccgcttggcggcacttcaagacattgcggaacgcgccggagatgctaaggatgaggcgtcagccgcattgatctggagcgaagcgtttagttttttgatgcccttgccggaaactgatcaggtagaaatcgtagacgaaggctcaggccgtgccgtcatgcaattgccagaaattgaggtaaaggtctgcactggcacgccaccccgcccagtcgcaacgtatcgtaatgaggtcccaggagtagcaaaagactgcatgttgtcctttgcgattgtcaatccacatgtggttccggagtttgccacggtggagtggactgtgcgtaatgagggacaggaggcggaccagcgtagtgatttagggcaccgtcgcgtcgggatgcgtttgttgagtgtagaggaacatacggcatatgtcggtcgtcactttatggattgtgtagtccgtctgaacgggcaagtttacgctgtccgtcgcgtacccgttaccattcgcgacgttcagcacgtcgcccgcaatcccccacgtccaccttacacaaaactgcgcagtttattccgccgccgtcgctaa

SEQ ID NO: 1266 - DNA, 4045 bp, Artificial Sequence
  Description of Artificial Sequence: Synthetic polynucleotide
tagcggagtgtatactggcttactatgttggcactgatgagggtgtcagtgaagtgcttcatgtggcaggagaaaaaaggctgcaccggtgcgtcagcagaatatgtgatacaggatatattccgcttcctcgctcactgactcgctacgctcggtcgttcgactgcggcgagcggaaatggcttacgaacggggcggagatttcctggaagatgccaggaagatacttaacagggaagtgagagggccgcggcaaagccgtttttccataggctccgcccccctgacaagcatcacgaaatctgacgctcaaatcagtggtggcgaaacccgacaggactataaagataccaggcgtttcccctggcggctccctcgtgcgctctcctgttcctgcctttcggtttaccggtgtcattccgctgttatggccgcgtttgtctcattccacgcctgacactcagttccgggtaggcagttcgctccaagctggactgtatgcacgaaccccccgttcagtccgaccgctgcgccttatccggtaactatcgtcttgagtccaacccggaaagacatgcaaaagcaccactggcagcagccactggtaattgatttagaggagttagtcttgaagtcatgcgccggttaaggctaaactgaaaggacaagttttggtgactgcgctcctccaagccagttacctcggttcaaagagttggtagctcagagaaccttcgaaaaaccgccctgcaaggcggttttttcgttttcagagcaagagattacgcgcagaccaaaacgatctcaagaagatcatcttattaaggggtctgacgctcagtggaacggtgcaccctgcagggctagctgataaagcgttcgcgctgcattcggcagtacatgtctaacgtttgaattttgcgtaacgttcgcgagcaatctctaaagtgctattacgtacacgctcaaaacgttccttatccttctgccataacgaacgcaccgcaagaccacgcacgctgttaaaaatcaaccacaaaatgtcctcggcatcgtcacgggataatccacgcgacaccagaacgcccaaccacatatcctcgaccacaaaacggttgcgctctaccgtgcgttggataccctcacgcagagctggatcacgatcagcggccacaatcagatcaaggctaattgaaaagtcgtcatccaagaaaaactcagcggcatcatcaagcatttgctgaatcacatcatcttccggttttaacttagccaggcgagcacggctgcgctcggtgatctgctcatacagccactcaaacgtagcaagcaacagttctaatttggtgggaaaatggtgtgactgggcgccacgagacacccccgcggcgcccggtacatccgcaatacgaaaacccgcgtatcccttctcgcgtaatacaccaagcgccgccgcgatcagtttaccttgtgtttccatcgcacgttcggcttgagtacggcgcttgggcgacatgattaccatcttgcgaaacgatcctcatcctgtctcttgatcagatcttgatcccctgcgccatcagatccttggcggcaagaaagccatccagtttactttgcagggcttcccaaccttaccagagggcgccccagctggcaattccggacgcgttgcgcctagggggaatggtccatgcctgcagtaacaccgtgcgtgttgactattttacctctggcggtgataatggttgcaacaaacagacaatctggtctgtttgtattatgttaaccagcacactggcggccgcttactagaaataattttggccgcatcccacgctaactaatataaaggaggttttaaatggacttttccaacatgagtatccttcactatttagcgaatattgtagacattttggtggtttggttcgtaatttacaaggttatcatgcttattcgcggcacgaaagccgtccagctgttgaaggggattttcattattattgccgtcaagttacttagcggcttcttcggattgcagacagtggaatggattactgatcaaatgctgacttggggtttcttagccattatcattatctttcaaccggaattgcgtcgtgccctggagactttggggcgtggcaatatctttacccgctatggatcacgcattgagcgtgaacaacaccaccttattgagtctattgaaaagtccacgcaatacatggcgaagcgtcgcattggagctttgatctctgtggctcgtgatacaggcatggacgactacatcgagactggcattccgcttaatgcgaaaatctcatcgcaattattgattaatatcttcatccccaatacccctcttcacgatggcgccgtgatcattaaaggtaacgagatcgcgagcgctgccagttatctgccattgtccgactcgccgtttctttctaaggagctgggaactcgccatcgtgccgcattagggatttccgaggtgacagattcaatcacaatcgttgtcagcgaggaaacaggtgggatttcccttacgaagggaggcgaactgttccgtgatgtatccgaagaagaattgcataagattttgcttaaagagctggtgactgtcacagctaaaaaaccaagcattttctccaaatggaaaggaggtaagtccgagtgatgagcatgctaatcagccgtggaattcggtctcaggaggaacgattggtaaacccggtgaacgcatgagaaagcccccggaagatcaccttccgggggcttttttattgcgcggaccaaaacgaaaaaagacgctcgaaagcgtctcttttctggaatttggtaccgaggcgtaatgctctgccagtgttacaaccaattaaccaattctgattagaaaaactcatcgagcatcaaatgaaactgcaatttattcatatcaggattatcaataccatatttttgaaaaagccgtttctgtaatgaaggagaaaactcaccgaggcagttccataggatggcaagatcctggtatcggtctgcgattccgactcgtccaacatcaatacaacctattaatttcccctcgtcaaaaataaggttatcaagtgagaaatcaccatgagtgacgactgaatccggtgagaatggcaaaagcttatgcatttctttccagacttgttcaacaggccagccattacgctcgtcatcaaaatcactcgcatcaaccaaaccgttattcattcgtgattgcgcctgagcgagacgaaatacgcgatcgctgttaaaaggacaattacaaacaggaatcgaatgcaaccggcgcaggaacactgccagcgcatcaacaatattttcacctgaatcaggatattcttctaatacctggaatgctgttttcccggggatcgcagtggtgagtaaccatgcatcatcaggagtacggataaaatgcttgatggtcggaagaggcataaattccgtcagccagtttagtctgaccatctcatctgtaacatcattggcaacgctacctttgccatgtttcagaaacaactctggcgcatcgggcttcccatacaatcgatagattgtcgcacctgattgcccgacattatcgcgagcccatttatacccatataaatcagcatccatgttggaatttaatcgcggcctcgagcaagacgtttcccgttgaatatggctcataacaccccttgtattactgtttatgtaagcagacagttttattgttcatgatgatatatttttatcttgtgcaatgtaacatcagagattttgagacacaacgtggctttgttgaataaatcgaacttttgctgagttgaaggatcagatcacgcatcttcccgacaacgcagaccgttccgtggcaaagcaaaagttcaaaatcaccaactggtccacctacaacaaagctctcatcaaccgtggctccctcactttctggctggatgatggggcgattcaggcctggtatgagtcagcaacaccttcttcacgaggcagacctcagcgc

SEQ ID NO: 1267 - DNA, 141 bp, Artificial Sequence
  Description of Artificial Sequence: Synthetic polynucleotide
cttgcgaaacgatcctcatcctgtctcttgatcagatcttgatcccctgcgccatcagatccttggcggcaagaaagccatccagtttactttgcagggcttcccaaccttaccagagggcgccccagctggcaattccgg

SEQ ID NO: 1268 - DNA, 621 bp, Artificial Sequence
  Description of Artificial Sequence: Synthetic polynucleotide
ctaacgtttgaattttgcgtaacgttcgcgagcaatctctaaagtgctattacgtacacgctcaaaacgttccttatccttctgccataacgaacgcaccgcaagaccacgcacgctgttaaaaatcaaccacaaaatgtcctcggcatcgtcacgggataatccacgcgacaccagaacgcccaaccacatatcctcgaccacaaaacggttgcgctctaccgtgcgttggataccctcacgcagagctggatcacgatcagcggccacaatcagatcaaggctaattgaaaagtcgtcatccaagaaaaactcagcggcatcatcaagcatttgctgaatcacatcatcttccggttttaacttagccaggcgagcacggctgcgctcggtgatctgctcatacagccactcaaacgtagcaagcaacagttctaatttggtgggaaaatggtgtgactgggcgccacgagacacccccgcggcgcccggtacatccgcaatacgaaaacccgcgtatcccttctcgcgtaatacaccaagcgccgccgcgatcagtttaccttgtgtttccatcgcacgttcggcttgagtacggcgcttgggcgacatgattaccat

SEQ ID NO: 1269 - protein, 206 aa, Artificial Sequence
  Description of Artificial Sequence: Synthetic polypeptide
MVIMSPKRRTQAERAMETQGKLIAAALGVLREKGYAGFRIADVPGAAGVSRGAQSHHFPTKLELLLATFEWLYEQITERSRARLAKLKPEDDVIQQMLDDAAEFFLDDDFSISLDLIVAADRDPALREGIQRTVERNRFVVEDMWLGVLVSRGLSRDDAEDILWLIFNSVRGLAVRSLWQKDKERFERVRNSTLEIARERYAKFKR

SEQ ID NO: 1270 - DNA, 123 bp, Escherichia coli
taacaccgtgcgtgttgactattttacctctggcggtgataatggttgcaacaaacagacaatctggtctgtttgtattatgttaaccagcacactggcggccgcttactagaaataattttg

SEQ ID NO: 1271 - DNA, 161 bp, Artificial Sequence
  Description of Artificial Sequence: Synthetic polynucleotide
taacaccgtgcgtgttgactattttacctctggcggtgataatggttgcaacaaacagacaatctggtctgtttgtattatgttaaccagcacactggcggccgcttactagaaataattttggccgcatcccacgctaactaatataaaggaggttttaa

SEQ ID NO: 1272 - DNA, 983 bp, Artificial Sequence
  Description of Artificial Sequence: Synthetic polynucleotide
taacaccgtgcgtgttgactattttacctctggcggtgataatggttgcaacaaacagacaatctggtctgtttgtattatgttaaccagcacactggcggccgcttactagaaataattttggccgcatcccacgctaactaatataaaggaggttttaaatggacttttccaacatgagtatccttcactatttagcgaatattgtagacattttggtggtttggttcgtaatttacaaggttatcatgcttattcgcggcacgaaagccgtccagctgttgaaggggattttcattattattgccgtcaagttacttagcggcttcttcggattgcagacagtggaatggattactgatcaaatgctgacttggggtttcttagccattatcattatctttcaaccggaattgcgtcgtgccctggagactttggggcgtggcaatatctttacccgctatggatcacgcattgagcgtgaacaacaccaccttattgagtctattgaaaagtccacgcaatacatggcgaagcgtcgcattggagctttgatctctgtggctcgtgatacaggcatggacgactacatcgagactggcattccgcttaatgcgaaaatctcatcgcaattattgattaatatcttcatccccaatacccctcttcacgatggcgccgtgatcattaaaggtaacgagatcgcgagcgctgccagttatctgccattgtccgactcgccgtttctttctaaggagctgggaactcgccatcgtgccgcattagggatttccgaggtgacagattcaatcacaatcgttgtcagcgaggaaacaggtgggatttcccttacgaagggaggcgaactgttccgtgatgtatccgaagaagaattgcataagattttgcttaaagagctggtgactgtcacagctaaaaaaccaagcattttctccaaatggaaaggaggtaagtccgagtga

SEQ ID NO: 1273 - DNA, 79 bp, Artificial Sequence
  Description of Artificial Sequence: Synthetic oligonucleotide
tgtatttatcaatattgtttgctccgttatcgttattaacaagtcatcaataaagccatcacgagtaccatagaggatc

SEQ ID NO: 1274 - DNA, 117 bp, Artificial Sequence
  Description of Artificial Sequence: Synthetic polynucleotide
tgtatttatcaatattgtttgctccgttatcgttattaacaagtcatcaataaagccatcacgagtaccatagaggatcgccgcatcccacgctaactaatataaaggaggttttaa

SEQ ID NO: 1275 - DNA, 939 bp, Artificial Sequence
  Description of Artificial Sequence: Synthetic polynucleotide
tgtatttatcaatattgtttgctccgttatcgttattaacaagtcatcaataaagccatcacgagtaccatagaggatcgccgcatcccacgctaactaatataaaggaggttttaaatggacttttccaacatgagtatccttcactatttagcgaatattgtagacattttggtggtttggttcgtaatttacaaggttatcatgcttattcgcggcacgaaagccgtccagctgttgaaggggattttcattattattgccgtcaagttacttagcggcttcttcggattgcagacagtggaatggattactgatcaaatgctgacttggggtttcttagccattatcattatctttcaaccggaattgcgtcgtgccctggagactttggggcgtggcaatatctttacccgctatggatcacgcattgagcgtgaacaacaccaccttattgagtctattgaaaagtccacgcaatacatggcgaagcgtcgcattggagctttgatctctgtggctcgtgatacaggcatggacgactacatcgagactggcattccgcttaatgcgaaaatctcatcgcaattattgattaatatcttcatccccaatacccctcttcacgatggcgccgtgatcattaaaggtaacgagatcgcgagcgctgccagttatctgccattgtccgactcgccgtttctttctaaggagctgggaactcgccatcgtgccgcattagggatttccgaggtgacagattcaatcacaatcgttgtcagcgaggaaacaggtgggatttcccttacgaagggaggcgaactgttccgtgatgtatccgaagaagaattgcataagattttgcttaaagagctggtgactgtcacagctaaaaaaccaagcattttctccaaatggaaaggaggtaagtccgagtga

SEQ ID NO: 1276 - DNA, 1918 bp, Artificial Sequence
  Description of Artificial Sequence: Synthetic polynucleotide
tcaatctgtaaacaaatcgaacatcagttgacgaagccagatattggccaaatccttatggtatttagcgtgccagaacatattaatggcaatctcgggaagcactaccggatgaggcagagcggacaagccgaaaggttcgacacagcaatccgctaagcggatcggcactgttgccagcaggtcagtacgttgaagaatatggccaacggctgcgaaatggggcacttccagacgaatatcacgacggatgcctacacgggtcatatacgtgtccacttcaccgtggcctgtgcctgctgcaataacacgtacatgtccataactacaaaagcgttcaagcgtcaatggctcacgggtaacggggtggtccttgcggcacaaacaaacgtagtggttttgcagtaaacggcgttggaagaagcctgtttgaaggttgggcagaagccccaccgccaaatcgacagttccattttgcaacgcctgcattaatgacatagacgaatcgcggacagtagaaatgacgcagttcggtgcttgatgggcaagtacgtccatcaggcgaggcatgaaataaatctccccaatatccgtcattgccagggtgaaagtacgctccgaagtaagggggtcaaagctctcatgatgttgtaaagcgttacgaagggcgtgcatggcactggtgacaggctcggccaagtgtgcggcgtatggcgttggttccatcccttggtgagtacggacgaacaacggatcttgtaacgatgtacgaaggcgttttaatgcgttagaaactgcgggttgagtaagcccaagattttctgcggtgatggagacgcgacgatctaccagcagctgattaaagacaactaacaggttaaggtccagatcacgcaattccatggggcctcgcttgggttattgctggtgcccggccgggcgcaatattcatgttgatgatttattatatatcgagtggtgtatttatcaatattgtttgctccgttatcgttattaacaagtcatcaataaagccatcacgagtaccatagaggatcgccgcatcccacgctaactaatataaaggaggttttaaatggacttttccaacatgagtatccttcactatttagcgaatattgtagacattttggtggtttggttcgtaatttacaaggttatcatgcttattcgcggcacgaaagccgtccagctgttgaaggggattttcattattattgccgtcaagttacttagcggcttcttcggattgcagacagtggaatggattactgatcaaatgctgacttggggtttcttagccattatcattatctttcaaccggaattgcgtcgtgccctggagactttggggcgtggcaatatctttacccgctatggatcacgcattgagcgtgaacaacaccaccttattgagtctattgaaaagtccacgcaatacatggcgaagcgtcgcattggagctttgatctctgtggctcgtgatacaggcatggacgactacatcgagactggcattccgcttaatgcgaaaatctcatcgcaattattgattaatatcttcatccccaatacccctcttcacgatggcgccgtgatcattaaaggtaacgagatcgcgagcgctgccagttatctgccattgtccgactcgccgtttctttctaaggagctgggaactcgccatcgtgccgcattagggatttccgaggtgacagattcaatcacaatcgttgtcagcgaggaaacaggtgggatttcccttacgaagggaggcgaactgttccgtgatgtatccgaagaagaattgcataagattttgcttaaagagctggtgactgtcacagctaaaaaaccaagcattttctccaaatggaaaggaggtaagtccgagtga

SEQ ID NO: 1277 - DNA, 4203 bp, Artificial Sequence
  Description of Artificial Sequence: Synthetic polynucleotide
tagcggagtgtatactggcttactatgttggcactgatgagggtgtcagtgaagtgcttcatgtggcaggagaaaaaaggctgcaccggtgcgtcagcagaatatgtgatacaggatatattccgcttcctcgctcactgactcgctacgctcggtcgttcgactgcggcgagcggaaatggcttacgaacggggcggagatttcctggaagatgccaggaagatacttaacagggaagtgagagggccgcggcaaagccgtttttccataggctccgcccccctgacaagcatcacgaaatctgacgctcaaatcagtggtggcgaaacccgacaggactataaagataccaggcgtttcccctggcggctccctcgtgcgctctcctgttcctgcctttcggtttaccggtgtcattccgctgttatggccgcgtttgtctcattccacgcctgacactcagttccgggtaggcagttcgctccaagctggactgtatgcacgaaccccccgttcagtccgaccgctgcgccttatccggtaactatcgtcttgagtccaacccggaaagacatgcaaaagcaccactggcagcagccactggtaattgatttagaggagttagtcttgaagtcatgcgccggttaaggctaaactgaaaggacaagttttggtgactgcgctcctccaagccagttacctcggttcaaagagttggtagctcagagaaccttcgaaaaaccgccctgcaaggcggttttttcgttttcagagcaagagattacgcgcagaccaaaacgatctcaagaagatcatcttattaaggggtctgacgctcagtggaacggtgcaccctgcagggctagctgataaagcgttcgcgctgcattcggcagttcaatctgtaaacaaatcgaacatcagttgacgaagccagatattggccaaatccttatggtatttagcgtgccagaacatattaatggcaatctcgggaagcactaccggatgaggcagagcggacaagccgaaaggttcgacacagcaatccgctaagcggatcggcactgttgccagcaggtcagtacgttgaagaatatggccaacggctgcgaaatggggcacttccagacgaatatcacgacggatgcctacacgggtcatatacgtgtccacttcaccgtggcctgtgcctgctgcaataacacgtacatgtccataactacaaaagcgttcaagcgtcaatggctcacgggtaacggggtggtccttgcggcacaaacaaacgtagtggttttgcagtaaacggcgttggaagaagcctgtttgaaggttgggcagaagccccaccgccaaatcgacagttccattttgcaacgcctgcattaatgacatagacgaatcgcggacagtagaaatgacgcagttcggtgcttgatgggcaagtacgtccatcaggcgaggcatgaaataaatctccccaatatccgtcattgccagggtgaaagtacgctccgaagtaagggggtcaaagctctcatgatgttgtaaagcgttacgaagggcgtgcatggcactggtgacaggctcggccaagtgtgcggcgtatggcgttggttccatcccttggtgagtacggacgaacaacggatcttgtaacgatgtacgaaggcgttttaatgcgttagaaactgcgggttgagtaagcccaagattttctgcggtgatggagacgcgacgatctaccagcagctgattaaagacaactaacaggttaaggtccagatcacgcaattccatggggcctcgcttgggttattgctggtgcccggccgggcgcaatattcatgttgatgatttattatatatcgagtggtgtatttatcaatattgtttgctccgttatcgttattaacaagtcatcaataaagccatcacgagtaccatagaggatcgccgcatcccacgctaactaatataaaggaggttttaaatggacttttccaacatgagtatccttcactatttagcgaatattgtagacattttggtggtttggttcgtaatttacaaggttatcatgcttattcgcggcacgaaagccgtccagctgttgaaggggattttcattattattgccgtcaagttacttagcggcttcttcggattgcagacagtggaatggattactgatcaaatgctgacttggggtttcttagccattatcattatctttcaaccggaattgcgtcgtgccctggagactttggggcgtggcaatatctttacccgctatggatcacgcattgagcgtgaacaacaccaccttattgagtctattgaaaagtccacgcaatacatggcgaagcgtcgcattggagctttgatctctgtggctcgtgatacaggcatggacgactacatcgagactggcattccgcttaatgcgaaaatctcatcgcaattattgattaatatcttcatccccaatacccctcttcacgatggcgccgtgatcattaaaggtaacgagatcgcgagcgctgccagttatctgccattgtccgactcgccgtttctttctaaggagctgggaactcgccatcgtgccgcattagggatttccgaggtgacagattcaatcacaatcgttgtcagcgaggaaacaggtgggatttcccttacgaagggaggcgaactgttccgtgatgtatccgaagaagaattgcataagattttgcttaaagagctggtgactgtcacagctaaaaaaccaagcattttctccaaatggaaaggaggtaagtccgagtgaggaggaacgattggtaaacccggtgtaataagcatgctaatcagccgtggaattcggtctcaggaggaacgattggtaaacccggtgaacgcatgagaaagcccccggaagatcaccttccgggggcttttttattgcgcggaccaaaacgaaaaaagacgctcgaaagcgtctcttttctggaatttggtaccgaggcgtaatgctctgccagtgttacaaccaattaaccaattctgattagaaaaactcatcgagcatcaaatgaaactgcaatttattcatatcaggattatcaataccatatttttgaaaaagccgtttctgtaatgaaggagaaaactcaccgaggcagttccataggatggcaagatcctggtatcggtctgcgattccgactcgtccaacatcaatacaacctattaatttcccctcgtcaaaaataaggttatcaagtgagaaatcaccatgagtgacgactgaatccggtgagaatggcaaaagcttatgcatttctttccagacttgttcaacaggccagccattacgctcgtcatcaaaatcactcgcatcaaccaaaccgttattcattcgtgattgcgcctgagcgagacgaaatacgcgatcgctgttaaaaggacaattacaaacaggaatcgaatgcaaccggcgcaggaacactgccagcgcatcaacaatattttcacctgaatcaggatattcttctaatacctggaatgctgttttcccggggatcgcagtggtgagtaaccatgcatcatcaggagtacggataaaatgcttgatggtcggaagaggcataaattccgtcagccagtttagtctgaccatctcatctgtaacatcattggcaacgctacctttgccatgtttcagaaacaactctggcgcatcgggcttcccatacaatcgatagattgtcgcacctgattgcccgacattatcgcgagcccatttatacccatataaatcagcatccatgttggaatttaatcgcggcctcgagcaagacgtttcccgttgaatatggctcataacaccccttgtattactgtttatgtaagcagacagttttattgttcatgatgatatatttttatcttgtgcaatgtaacatcagagattttgagacacaacgtggctttgttgaataaatcgaacttttgctgagttgaaggatcagatcacgcatcttcccgacaacgcagaccgttccgtggcaaagcaaaagttcaaaatcaccaactggtccacctacaacaaagctctcatcaaccgtggctccctcactttctggctggatgatggggcgattcaggcctggtatgagtcagcaacaccttcttcacgaggcagacctcagcgc

SEQ ID NO: 1278 - DNA, 903 bp, Pseudomonas sp.
tcaatctgtaaacaaatcgaacatcagttgacgaagccagatattggccaaatccttatggtatttagcgtgccagaacatattaatggcaatctcgggaagcactaccggatgaggcagagcggacaagccgaaaggttcgacacagcaatccgctaagcggatcggcactgttgccagcaggtcagtacgttgaagaatatggccaacggctgcgaaatggggcacttccagacgaatatcacgacggatgcctacacgggtcatatacgtgtccacttcaccgtggcctgtgcctgctgcaataacacgtacatgtccataactacaaaagcgttcaagcgtcaatggctcacgggtaacggggtggtccttgcggcacaaacaaacgtagtggttttgcagtaaacggcgttggaagaagcctgtttgaaggttgggcagaagccccaccgccaaatcgacagttccattttgcaacgcctgcattaatgacatagacgaatcgcggacagtagaaatgacgcagttcggtgcttgatgggcaagtacgtccatcaggcgaggcatgaaataaatctccccaatatccgtcattgccagggtgaaagtacgctccgaagtaagggggtcaaagctctcatgatgttgtaaagcgttacgaagggcgtgcatggcactggtgacaggctcggccaagtgtgcggcgtatggcgttggttccatcccttggtgagtacggacgaacaacggatcttgtaacgatgtacgaaggcgttttaatgcgttagaaactgcgggttgagtaagcccaagattttctgcggtgatggagacgcgacgatctaccagcagctgattaaagacaactaacaggttaaggtccagatcacgcaattccat

SEQ ID NO: 1279 - DNA, 155 bp, Artificial Sequence
  Description of Artificial Sequence: Synthetic polynucleotide
ggggcctcgcttgggttattgctggtgcccggccgggcgcaatattcatgttgatgatttattatatatcgagtggtgtatttatcaatattgtttgctccgttatcgttattaacaagtcatcaataaagccatcacgagtaccatagaggatc

SEQ ID NO: 1280 - protein, 300 aa, Pseudomonas sp.
MELRDLDLNLLVVFNQLLVDRRVSITAENLGLTQPAVSNALKRLRTSLQDPLFVRTHQGMEPTPYAAHLAEPVTSAMHALRNALQHHESFDPLTSERTFTLAMTDIGEIYFMPRLMDVLAHQAPNCVISTVRDSSMSLMQALQNGTVDLAVGLLPNLQTGFFQRRLLQNHYVCLCRKDHPVTREPLTLERFCSYGHVRVIAAGTGHGEVDTYMTRVGIRRDIRLEVPHFAAVGHILQRTDLLATVPIRLADCCVEPFGLSALPHPVVLPEIAINMFWHAKYHKDLANIWLRQLMFDLFTD

SEQ ID NO: 1281 - DNA, 164 bp, Artificial Sequence
  Description of Artificial Sequence: Synthetic polynucleotide
agttgttcttattggtggtgttgctttatggttgcatcgtagtaaatggttgtaacaaaagcaatttttccggctgtctgtatacaaaaacgccgcaaagtttgagcgaagtcaataaactctctacccattcagggcaatatctctcttggatccaaagtgaa

SEQ ID NO: 1282 - DNA, 201 bp, Artificial Sequence
  Description of Artificial Sequence: Synthetic polynucleotide
agttgttcttattggtggtgttgctttatggttgcatcgtagtaaatggttgtaacaaaagcaatttttccggctgtctgtatacaaaaacgccgcaaagtttgagcgaagtcaataaactctctacccattcagggcaatatctctcttggatccaaagtgaacccgcatcccacgctaactaatataaggggggcaaga

SEQ ID NO: 1283 - DNA, 1251 bp, Artificial Sequence
  Description of Artificial Sequence: Synthetic polynucleotide
atgacgacccgaaatgattgcctagcgttggatgcacaggacagtctggctccgctgcgccaacaatttgcgctgccggagggtgtgatatacctggatggcaattcgctgggcgcacgtccggtagctgcgctggctcgcgcgcaggctgtgatcgcagaagaatggggcaacgggttgatccgttcatggaactctgcgggctggcgtgatctgtctgaacgcctgggtaatcgcctggctaccctgattggtgcgcgcgatggggaagtagttgttactgataccacctcgattaatctgtttaaagtgctgtcagcggcgctgcgcgtgcaagctacccgtagcccggagcgccgtgttatcgtgactgagacctcgaatttcccgaccgacctgtatattgcggaagggttggcggatatgctgcaacaaggttacactctgcgtttggtggattcaccggaagagctgccacaggctatagatcaggacaccgcggtggtgatgctgacgcacgtaaattataaaaccggttatatgcacgacatgcaggctctgaccgcgttgagccacgagtgtggggctctggcgatttgggatctggcgcactctgctggcgctgtgccggtggacctgcaccaagcgggcgcggactatgcgattggctgcacgtacaaatacctgaatggcggcccgggttcgcaagcgtttgtttgggtttcgccgcaactgtgcgacctggtaccgcagccgctgtctggttggttcggccatagtcgccaattcgcgatggagccgcgctacgaaccttctaacggcattgctcgctatctgtgcggcactcagcctattactagcttggctatggtggagtgcggcctggatgtgtttgcgcagacggatatggcttcgctgcgccgtaaaagtctggcgctgactgatctgttcatcgagctggttgaacaacgctgcgctgcacacgaactgaccctggttactccacgtgaacacgcgaaacgcggctctcacgtgtcttttgaacaccccgagggttacgctgttattcaagctctgattgatcgtggcgtgatcggcgattaccgtgagccacgtattatgcgtttcggtttcactcctctgtatactacttttacggaagtttgggatgcagtacaaatcctgggcgaaatcctggatcgtaagacttgggcgcaggctcagtttcaggtgcgccactctgttacttaa

SEQ ID NO: 1284 - DNA, 1023 bp, Artificial Sequence
  Description of Artificial Sequence: Synthetic polynucleotide
agttgttcttattggtggtgttgctttatggttgcatcgtagtaaatggttgtaacaaaagcaatttttccggctgtctgtatacaaaaacgccgcaaagtttgagcgaagtcaataaactctctacccattcagggcaatatctctcttggatccaaagtgaacccgcatcccacgctaactaatataaggggggcaagaatggacttttccaacatgagtatccttcactatttagcgaatattgtagacattttggtggtttggttcgtaatttacaaggttatcatgcttatccgcggcacgaaagccgtccagctgttgaaggggattttcattattattgccgtcaagttacttagcggcttcttcggattgcagacagtggaatggattactgatcaaatgctgacttggggtttcttagccattatcattatctttcaaccggaattgcgtcgtgccctggagactttggggcgtggcaatatctttacccgctatggatcacgcattgagcgtgaacaacaccaccttattgagtctattgaaaagtccacgcaatacatggcgaagcgtcgcattggagctttgatctctgtggctcgtgatacaggcatggacgactacatcgagactggcattccgcttaatgcgaaaatctcatcgcaattattgattaatatcttcatccccaatacccctcttcacgatggcgcagtgatcattaaaggtaacgagatcgcgagcgctgccagttatctgccattgtccgactcgccgtttctttctaaggagctgggaactcgccatcgtgccgcattagggatttccgaggtgacagattcaatcacaatcgttgtcagcgaggaaacaggtgggatttcccttacgaagggaggcgaactgttccgtgatgtatccgaagaagaattgcataagattttgcttaaagagctggtgactgtcacagctaaaaaaccaagcattttctccaaatggaaaggaggtaagtccgagtga

SEQ ID NO: 1285 - DNA, 59056 bp, Escherichia coli
aggcctctcctcgcgagaggcattttttatttgatgggataaagatctttgcgcttatacggttggatttcgcccggtttgcgagttttcagcaattttaatatccaggtgtattgttctggtcgcggaccaacaaaaatctcgacttcttcattcatccgccgcgcaatcgtatgatcatccgcctctaacagatcatccatcggtgggcgcacctgaatcgtcagacgatgcgtcttgccatcataaatcggaaatagcggtacaacgcgcgcacggcacactttcatcaaacgaccaatcgcgggcaacgtcgctttataggtggcaaagaaatcaacaaattcgctgtgttctgggccatgatcctgatcgggtaaataatatccccagtaaccctgacgtaccgactggatgaatggtttaataccatcatttctcgcatgcagacgaccaccaaagcgacggcgcaccgtgttccagacataatcaaaaaccgggttgccctgattatggaacatcgctgccattttctgcccttgcgaggccatcagcatggcaggaatatcgacggcccaaccgtgcggcaccagaaaaatcactttctcgttattacgtcgtatctcttcgatgatctccagcccttgccagtcaacgcgcggctgaattttctccggcccgcgtattgccaactcagccatcattaccatcgcttgcggcgcggtggcaaacatctcatctacaatcgcttcgcgttcagcttcactacgttctggaaagcagagcgacagattgattaacgcacgacggcgtgagctttttcccagtcgtccggcaaaacgtcccagccgtgccagaatgggatcacggaactttggcggcgttaaagcgatacccgccatcgctgctacgcccagccatgctccccagtagcgcgggtggcgaaaggatttatcaaactcaggaatgtattcgctattattttttttcgtttccatgcttttccagtttcggataaggcaaaaatcaatctggtgatagtgtagcggcgcaacttgccccgcaccaaataaaaaagccggtactgactgcgtaccggctgcgaatggatgttaattaatcaaaccgtagctgcggcacaatctctttggcctgtgccaggaattcgcgacgatcggagccggtcagcccttcggtacgcggcagttttgccgtcagcgggtttacggcctgctggtttatccatacttcatagtgcagatgcggcccggttgaacgtccggtattaccggaaagcgcgatacggtcgccacgtttcaccttctgtcccggtttcaccaggatcttgcgcaagtgcatataacgcgtggtgtagctgcgaccatgacgaatagccacataataacctgctgcgccactacgtttggcaaccaccacttcaccgtcacccactgaaagcactggcgtaccttgtggcatggcaaaatcaacacctctgtgtggcgcaacgcgaccggtcaccggattagtacgacgcgggttaaagttagatgagatacggaactgtttcgccgtcgggaatcgcaagaatcctttcgccagaccagtaccgttacgatcgtagaatttgccatcttcagcgcggattgcgtaataatctttaccttctgaacgcaaacgtacgcccagcagctggctttgctcacgtttaccatcaagcatttctcgtgacattaacaccgcaaattcatcgccttttttcagtttgcggaaatccatttgccactgcatggctttaatcactgcgctcacttcggcgctggttaaaccggcgtttctggcgctggcaacaaagcttcccccgacggtacctttcagcagattgttgacccactctccttgctgcatttcgctggtcattttaaaaccgttagcggcagtacggtcataggttcgggtttcacgacgagacacttcccaggtgaggcgctgcagttcgccgtccgcggttaatgtccaggagagttgttgaccgattttcaggttacgcaattctttgtcggcagcagccagttgggtgatatcacccatatcaataccatactgattgagaatgctgcttagcgtatcgccagtggaaacaacatattcatgcacgcccgcttcaccggcgattttgtcatccagttcgtcctggggaatggcttcatcttcttgtgcagcttgatcaatcggctcactggcttcaggtaagagcgaacgaatttcgttctgttccagctcaatggttttgacaattggcgtggcatcgcggtgataaacatagggccgccagacagcgacggccagagtaagaacggtgagcgaccccaacataacgcggtgtggtcgcggtaaattattaaacgccagggcgacagagcgggctatctgttgcacgtaatcacttcctcattaatctcctttcaggcagctcgcatactggttggctaattgattcaggaattctgaatagcttgttttacccagtttgatattcgtccccaggggatccaacgttcccatacgaacggatgtccctcgtgcgacgctctcaacgaccgctggcctgaactgtggctcagcaaaaacgcaggttgctttttgctcaaccaactgtgttcttatttcatgtaaacgctgcgcgccaggttgaatctcagggttaacggtaaaatgaccaagcggtgtcagtccgaactgtttttcgaaatagccgtaagcatcgtgaaaaacgaaataacctttccccttgagcggcgcgagctcgttaccaacctgcttttcggttgaggctaattgtgcctcaaaatccttcaggttggcgtcaagtttggctcgactttgcggcataagttccactaattttccatggattgcaaccgctgtagcccgcgctatctctggggaaagccaaagatgcatgttgaaatcgccgtgatggtgatcttcgtcacttttttccgcgtggtcgtgatcatcatcatcgccgtgaatacttttcatcagcagcggtttcacattctctagctgcgcaatcgttacctgtttcgcttcaggtaatttacttaccggtttttgcatgaacgcttccatctccgggccaacccaaacgactaagtccgcgttctgtaagcgttttacatctgatggacgcagtgaataatcatgttctgaagccccgtcaggtagtaaaacctccgtttctgttaccccatcagcaatggcagaagcgatgaacccaacgggtttaagcgaagcgacaacggcagcatctgcggcctgtgttgcaccgccccagagagcggcggataatgctgcgaaaagaagcgtttttttatgtaacataatgcgaccaatcatcgtaatgaatatgagaagtgtgatattataacatttcatgactactgcaagactaaaattaacatgacaagtctggtttccctggaaaatgtctcggtttcttttggccaacgccgcgtcctctctgatgtgtcgctggaacttaaacctggaaaaattttgactttacttgggccaaacggcgcaggtaagtcgacactggtacgggtagtgctcgggctggtaacacccgatgaaggggttatcaagcgcaacggaaaactgcgcatcggctatgtaccgcagaagctgtatctcgacaccacgttgccactgaccgtaaaccgttttttacgcttacgccctggcacacataaagaagatattttgcctgcactgaaacgtgtccaggccgggcatctgattaacgcaccgatgcaaaagctctcgggtggcgaaacgcagcgtgtactgttagcgcgagcattgttaaatcgaccgcaattattagtgctggatgaacccactcagggcgtggatgtgaatggtcaggtggcgttatatgaccttattgaccaactgcgtcgcgaactggattgtggcgttttaatggtatctcacgatctgcatctggtaatggcaaaaaccgatgaagtgctttgcctgaatcaccacatttgttgttccggcacaccggaagttgtttccctgcatccggagtttatttctatgtttggtcctcgtggtgctgaacaactgggtatctatcgccatcatcataatcatcgtcacgatttacagggacgaattgttttgcgtcggggaaatgatcgctcatgattgaattattatttcccggttggttagccgggatcatgctcgcctgtgccgcgggtccgctgggttcgtttgtagtctggcgtcgtatgtcttatttcggtgatacgctggctcatgcctcattacttggcgtcgcgtttggtttgttgctggacgtgaatccattctatgcggtgattgccgttacgctgctgctggcgggcggtctggtatggctggagaagcgtccacagctggcgatcgacacgttattagggattatggcgcacagtgccctgtcgctgggcctggtggtcgttagtctgatgtctaatattcgtgttgatttgatggcttacctgttcggtgatttactggcagtgacgccagaagatctcatctctattgcgattggcgtggtcatcgtggtggctattttgttctggcaatggcgcaatttgctgtcgatgacgattagcccggatctggcgtttgttgatggtgtgaaattacagcgcgtgaaattgttgttgatgctggtgacggcattgacgattggtgtagcgatgaaattcgtcggcgcgttgattattacttcactgctgattattcctgctgctactgcacgtcgctttgcccgcacgccggaacagatggctggtgtcgctgttttggtggggatggtggcagtgactggcggtttaaccttttccgcattttacgatacacctgcaggcccgtcggtggtgctatgcgcggcactgttatttattatcagtatgatgaaaaagcaggccagctaatctgtcgctgaacacatttgtcggatgcggcgcgagcgccttatcccacctgcggttcgctatctctggtaggcctgataagacgcgaacagcgtcgcatcaggcacactgccagtgtcggatgcggctcgagcgaccaatccgacttacggcatttctggcggcgtgatgccgaagtggttccacgcccgcactgtcgccatacgcccgcgcggtgtacgctgcaaaaagccttgctgaatcaaataaggttccagtacatcctcaatggtttcacgttcttcgccaatggctgccgccaggttatccagacctaccggcccaccaaagaacttatcgattaccgccagcaacaatttgcggtccatataatcgaaaccttcagcatcgacattcaacatatccagcgcctgagcagcgatatctgccgagatggtgccatcgtgcttcacttcagcgaaatcacgcactcgacgcagcagacggttggcaatacgtggcgtaccgcgcgcacgacgagcaacttccagcgcgccgtcatcactcatctcaagccccataaagcgtgcgctgcgactgacgatatattgcagatccggcacctgataaaactccagacgttgcacaataccaaaacgatcgcgcaacggtgatgtcagcgaacctgcgcgcgtggttgcaccaatcagggtaaacggcggcaaatcaattttaatggagcgtgccgccggaccttcaccaatcatgatatccagttggtaatcttccattgccggatacaacacctcttccaccactggtgaaagacggtggatctcatcaataaacagtacatcgtgtggttcaaggttagtgagcattgctgccagatcgcccgccttttccagcaccggaccagaagtcgtgcgtaaattaacgcccatttcattggcgacaatattggcaagcgtagttttacccaaccccggaggaccaaaaatcaatagatgatcgagggcatcgccgcgcagtttcgctgctttgatgaaaatctccatctgcgaacgaacctgcggctgaccaacatactcttccagtaatttagggcgaatggcgcgatctgccacatcttccggcaaagtggtaccggcagaaatcagacggtctgcttcaatcatcctttacctcataacgcggcgcgtagggcttcgcgaattaatgtttcactgctggcgtcagggcgagcgattttgctcaccatgcggcttgcttcttgtggtttatagcccagtgccaccagcgcagcaaccgcttcctgttcagcatcgtcggtcgccgggctggcaggagacgtgagtaccaggtcggcggctggcgtaaagagatcgccatgcaaacctttaaatcggtctttcatttcgacaatcaagcgttcggcggtttttttgccaatacccggcagtttcaccagtgcccccacttcttcacgctcaacggcattaacgaactgctgcgctgacattccggagaggatcgccagcgccaacttcgggccgacgccgttggttttgatcaactctttgaacaacgtgcgctcttgtttattgttaaaaccgtacagcagttgcgcgtcttcacgcaccacaaagtgggtgaaaacgatcgcttcctgacccgcttcagggagttcataaaaacaggtcatcggcatatgcacttcatagcctacgccgcccacttcaattaacaccagcgggggttgtttttcaatgatgatgcctctgagtctgcctatcacatgacgctcctgcgtaatgaatcaaagataatgctgtatgataaaaaaatgctggatagatatccagcgaaggatgaagaaaacttgcgaggtgtctcgatgatctgaaaaatggcgcagtataatttattctacagattatattggaagcaaatatttaaatattacatattcagcgaagaaatgtgtaataaaaatacacattgcgacccctgaaaaaaataaattttttatgctattacgtatattcatatctatttcaatggaatgacaacgtgaatattaattatcctgctgaatatgaaattggtgatatcgtctttacatgtataagtgctgccttatttggtcaaatatcagctgcatcaaattgctggagtaatcacgtcgggatcattatcggtcataacggtgaagactttctggttgcagaaagccgtgttcccctctcaaccatcactacgctatcccgttttattaaacgctctgctaatcaacgctatgctataaagcgattagacgccggactaacagaacaacaaaatcaacgaattgttgaacaggttccttcccggctacgcaaaatttaccacaccggttttaaatacgaatcttcgcgccagttctgttcaaaatttgtttttgatatttataaagaggcgctatgtattccggtgggtgaaatagagacgtttggagaattgttaaatagcaatccaaatgcaaaactcactttctggaaattctggttcttaggttctattccgtgggagcgtaaaaccgtcacgccagccagtttgtggcatcatccgggtttggtgttgattcacgcggtgggagttgaaacgcctcagcctgaactgaccgaggcggtataacttaacgcagtcgccctctcgccaggttcagtcgcgattcgctcatttgcatcgcattctgactaacgtggcagtgggtgatggcaatcgccagcgcatcggcggcatccgcctgtggattagcgggcagtttcagcaaggtgcggaccatatgctgcacctggcttttttcggcactaccaatacctaccactgtttgctttacctgacgtgccgcatattcaaataccggcaattcctgattcaccgccgccacaatcgccacgccgcgcgcctgccccagtttcagggctgagtcagcgttcttcgccataaagacctgttcaatggcgaaataatcaggctggaattgggtgatgatttccgtcacgcccgcatagatgagcttcagacgagacggtaaatcatccactttggtgcgtatgcatccgctacccaggtaggacagttgcctgcctacctggcggatgacgccatagccggtcacgcgcgaacccgggtcaatgccgagaataatagccatcacgcgtctccgttttgctgtttagcaggcctcatcagagagtcgctgcaacctcatcagagatttcaccgttatggtaaacttcctgcacgtcgtcgcaatcttccagcatatcgatcagacgcatcagtttcggtgcggtttctgcatccatatcagctttggtggacgggatcatggaaacttccgcgctgtctgctttcagacctgccgcttccagagcgtcgcgtactttgcccatttcttcccatgcagtgtagacatcaatcgcgccgtcatcataggtcacaacgtcttcagcaccggcttccagggctgcttccatgatggtgtcttcatcgcctttctcgaaggagatcacgccttttttgctgaacaaataagctacggaaccatcagtaccgaggttaccgccacatttgctgaatgcatgacgcacttcagcaacggtacggttgcggttgtcagacagacattcaatcatgattgccgtgccgccaggaccgtaaccttcgtagatgatggtttccatgtttgcatcatcatcaccgcccacacctcgtgcaattgcgcggttcagagtgtcacgggtcatgttgttagacagtgctttatcaattgctgcacgcaaacgcgggttagcgtccggatcaccaccgcccagcttagccgcggttaccagctcacgaatgattttagtgaagattttaccgcgcttagcatcctgcgcagctttacgatgtctggtgttggcccatttactatgacctgccataaaaatatctccagatagccctgcctgttcaggcagcgttaattacaaactgttcaatcgcctgccggttgctccaggacttagtgagcgccgccgcagcagacgcatcaagccacttgtaagccagatgttcagtgaaaacgatctggcgctcgtgcggaagcgcaagacagaaccatgattccgtattacgcgtcacgcccggcgcatagcgatgacgtaaatgtgaaaaaatttcaaactctaccgtgcgctgacagtcaattaaggtcagttgttcagcgacaacatcaatggtgacctcttcctttacttcgcgcatggcagcttgcggcgcggtttcaccctcttccacgctgccggttaccgactgccagaaatcgggatcgtcacgccgctgcaacatcagcacccgtttcgtatcttgtgcgtagatgaccactaagatcgaaacgggacgcttataagccatatcagttattctcagccttcttcacaacctgaatgctcagctcagccagtgcagtcgggttagcaaagctcggcgcttcagtcatcaaacacgctgccgccgtggttttcgggaaggcgataacgtcacggatattgtcggtgccggtcagcagcatcgtcagacggtcaagaccgaatgccaaacctgcgtgcggcggagtaccgtatttcagggcgtcgagcaggaagccgaatttctcgcgctgttcctcttcgttgatacccagaataccaaacaccgtctgctgcatatcaccattatggatacgcacagaaccaccgcccacttcgtaaccattgatgaccatatcgtaagcgttagccaccgcattttccggtgcagctttcagttctgctgccgtcatgtctttcggtgaggtgaacggatggtgcattgctgtcaggccgccttcaccgtcgtcttcaaacatcgggaagtcgataacccacagcggtgcccatttgctttcgtcggtcagaccaaggtctttacccactttcaggcgcagtgcgcccatcgcgtcggcaacaattttcttgttgtcggcaccgaagaaaatcatatcgccatcttgcgcgccagtacgctccaggatggcttcgatgatttctgcattaaggaacttcgctaccgggctattgataccttccagacctttcgcgcgttcgttaactttgatgtaagccagacctttcgcgccgtagattttaacgaagttaccgtattcgtcgatctgcttacgggtcaacgatgcgccgcccggaacacgcagagcggcaacacggcctttcggatcgttcgccggacctgcaaatactgcaaactcaacagatttcagcagatcggcaacgtcggtcagttccatcgggttacgcagatccggtttatcagaaccataacggcgttctgcttctgcaaaggtcattaccgggaaatcgcccagatccacgcccttcacttccagccacagatgacgcaccagcgcttccatcacttcacgcacttgcggcgcggtcatgaaagaagtttccacatcgatctgagtaaattcaggctgacggtcagcacgcaggtcttcgtcacggaagcatttaacgatctgatagtagcggtcaaagccggacatcatcagtagctgtttgaacaactgcggggattgcggcagcgcgtagaatttacctttgtgcacacgagaaggcaccaggtagtcacgcgcgccttcaggcgtggctttggtcagcatcggagtttcgatgtcgaggaagccgtggtcatccataaaacggcgcaccaggctggtgattttagcgcgggttttcaggcgctgagccatttccgggcgacgcaggtcgaggtagcggtatttcagacgcgcttcttcggtgttgacgtggttagagtcaagcggcagaacatctgcacggttgatgatagtcagcgaggacgccagtacttcgatttcgccagtcgccatatcgcggttaatatttttttcgtcacgcgcacgtacggtgcccgtgacctgaatgcagaactcattacgcagttcagaggccagctttaacgcgtccgcacgatccggatcgaaaaatacctgcacgataccttcgcggtcgcgcatatcgatgaagatcaggctaccaagatcacgacgacggttgacccaaccacacagagtcacctgctgccccacgtgggacaaacggagctgtccacaatattctgtacgcatgagatatcccttaacttagctgccggcggatgccccctgctgcgcaggtgaccaagtcgcagcgttagctgtatgtcacaactgaatgaaaaaaggcggctattatactggaaattctgccgcaccgtaagagcctggcccgcgctggaacgcctcgttaccactttatatcgggcctgaaatcagactctacgccagtttgctataaaggtgttgcccgaactcataaaaattaacaaaatttgtcgttccgccatcggctaatcgcattaaggtgagaggcacgattttgttttgtcaggagtcatcatgcttgaacttaatgctaaaaccaccgcgctggtggtgattgatttacaagaaggcatcttgccttttgccggaggtccacatactgccgatgaggtggttaatcgcgccgggaagctggcggcgaaatttcgcgccagcggtcagcccgtgtttctggtgcgcgttggctggtctgccgattacgccgaagcattaaaacagccggttgatgccccctcccccgcaaaagtgttgcccgaaaactggtggcaacatcctgctgcattaggtgcaaccgacagcgatatcgaaatcatcaaacgtcaatggggtgcgttttacggtacggatctggagttgcaattacgccgccggggtatcgatacaatagtgttatgtgggatctcgaccaatatcggtgttgaatccaccgcccgcaatgcctgggaactcggttttaatctggtgattgccgaagatgcctgtagcgccgctagcgccgagcagcacaataacagcattaatcatatctacccgcgcatcgcccgtgtgcgtagcgttgaagagatcctcaacgcgttatgatttacatcggtttgccacaatggtcgcatcctaaatgggtgcggttggggatcaccagccttgaagagtatgcccgccactttaactgcgtgacgcgggcattttaaaaatcactaaagaacgcccaagagcatgtgttttctttagtttattcaatgcattaaaaaatagtttcgcatgaaattcggtaaacttcatgtgtgcaataatgtcccattcatgccccaaaatgccccaaagcagacatttttgccccaagtatgccccacaagtcacgtcttcaagtcgtctatatccatagcacaccgagttacattcttgcatccggggtgtcgacaatacctactttattgagtgtgcgagaattaccaggaacctttccacaatgtagtagtctaatagtcgaatccatctaacattaagaagcgttatgatcactagcctctcattgatatcttctgtaatagtcactctatgtatcatggtgttcgctacagtaaaggtagggattggtttgtctaacaatccagacagaaatgataattaacctcaaccacgtaaccacacttcatacttcatacttcacttaacagtgaagtgctcacatcaccgggcagtcatcaaactccgcattcctggcatcattaatgatgtacgtgatcactccaaatatagcgggtgcagaactgtaaccatcatcatctgctggcagcgcttcccttctcccgttatccagattaaccaggtgcggctgaggatgagtccgatatcgcttgatcctgaattccccgtcgattgcacatatcagcagtgaaccatcgcaggcagtaagtgacgcatccacaacaagcaacgctccctggattatcccttccctgaaatgtgaacgcgatgcccgcatgaaataagtcgctgcgggctgactgattagctgctgatcgagggagattcgtgtttcaacataatctgccgcaggtgaaggaaatcccatgtttacgccctctcttgaataccggataaaaacacagtataaatactgtatatccatccagcaaagaggcaatgagcaatgttcgtggaactcgtttatgacaaaaggaattttgatggtctgcccggtgcaaaagatatcattctgggcgagttaactaagagagttcaccggatcttccccgatgctgatgttcgggttaaaccgatgatgacactgccggcgatcaacactgacgccagcaagcatgagaaggaacagataagccgtactgttcaggaaatgtttgaagaggctgaattctggttagtgagtgagtaaagattttcaatgcccgccacagttacgtattgattatgctgtggaggatattcattttcgtaaacgttggtttgggagaagcggcaaaacggaatgtgggaacaggggaaaatcagataccagatatgtctgcatttccatctggcaataactggtttcagttaccaagtggacatatcgttcagatattttccatgaacgttcttggtgcagatgctaatggcacgtcagctaattaccccattgcttttccaacaacgatgattgctgtcagtgctctatggtctgatgggactgtagcaaatgcaccgacatacaagatgatggggaacacgactaacagaacaactttgacgataaaagtatcagccagctcaggtacttacgggacaatgattattgcggtgggacgataatatgaataaatacagttactctccttcagaaaatgccttttatgctgttgcgttaaaaaatacctatgaattgagtggcacatggccagctgatgcattagatattcctgatgacatttctgtaaaatatatggcggaaccgccacaagggaaaatccgagttgcaggggaaaatggttttcccacatgggctgaaatacctccaccatcacatgaggaacttattgaacaggccgaatcagagaggcaattattgattaaccaggccaacgaatacatgaacagtaaacaatggcccggtaaagccgctattggtcgtctgaaaggcgaggaactggcacaatataattcgtggctggattatctggacgcactggaactggtcgatacttccggtacgcccgatattgaatggcctacgcctccggcagttcaggccagatgacatccggcgcggtgctggtatctgttgcagtcaccgcgtcaatgtaatccagcacggcgttaagtcgggttgtttctgcctgagtcagtttccgtccggcctgtaatttcagctgaatcagactaatggaagccattgctgcatcaatcagtgattggcgctgtgcttctgccgcttctactgaggcaccgtgttgtgcctcagtatctgtcacccatttctcaccatcccatttatcatatggcgttaacggtgaaagcgtgacataaccgtttttgatggcaccgatataatccactgtaacagctgcgccattttcgattgagtaaacagtctcattgcgatggtcttcctcatggctccatcccttacctgtaaatactgccactcttcccggaatgttttcgtccgggtcaataccagtggaacaggcgggcatacttacgccagtattaatatattcatcagaccagcccgtatattcagacgttactgcatcataataaaaacaacgcatatcacccggcactgcagccagcccattttcatcaaaaacaggtttcattatttagccctcaccagaaagttaaatgcaatatttcgcggtctgacagcaacaaaattcacaccatcacccacagagttactgttgaaattaaatcgtgaaaatcctggctgatttccggcgatgccatcatgaaagttaattgcgtgtccagcacctccgcctatattcccggcaaactgagaaaagtttgtagcttcctgccagcttaataattcgcgaccaccatctgcacctcgcccgtcatcccagacacgaatgaaatcaccgcgggcttcaggtaataccagcgaaggaaacactttcgccagcacaggataatcagtggcagagaatttcgcgccgttgaacttcaaaaacaccatactggaccagctgtcgattacagtatttggcattgcagcggacggccagaagaacggaacgccaatagctggagaaccttctcccaaaccaaggtttgtgcgagcgtctgcggcattcgttgcgccggttccgccgtctgcgacagtaaccgcaccgttgctccctttctgcgcaagtttaccgatgcctgggatggttacggcggtgccgttgatggtaactgtgatgctttggtttgctgaggtggtggcgaacgtctcccacgcgccaatattctcgtcgtactctttgatgagctgtgacatggcctgcgccaggccgtcgactgagatattgtccgacacaaggattccatacttctggccgctcagcgccggggaaactgctggcgtaaccgtcattgacgtggcgctgttcacggatgaaatctgaaacagctgcaccgggttagacatcacgataatcgtctggccagcgcggacctggctggcgggagctgtccagtttgtgccggagccggttgcggtatttccgttaatagagatagttccggtgctataaatcataacaactcctaaatttagacaacatgaagcccggagaggtatataaccctcaccagaaataatttctgaattggtttttaatacatgttgggcaacgccagtgttggcatagctatagttgtatcaaatgccattgaccacccacccaaataataattgccgactactttattcctttctgctctgacattcccacctgtcattacaattcctttatacctaatatttccgtaaccaccaacgtgtcgacagttagccccggtataaacaatctggcaaaattcatcaccaatattcaggttcgcattggcgatatttattgtcccatcaaaaatgaatggcttcgtgcaagtaagaagacgtttgcgttgacgattggtttattcaatccatcaactaaaatatcatgtaaacgaattgccataacatttcccactttattttacttactcaacacaacaagtatattaaaattgaaccttgtcaacaacacaaaggagtcccaatgaaactcgctctaattatgctgccattatgtctgtccctcactgcatgtggtaatggtttaaataccggtaaaccaaattccggtgtcattccaaaacctttggatcgagatggtaacggttctttaatttatgataccgaaaaccttccaatgacggggcagtggtgtcacgagattgatcacgaataccgacgaatcggtagcccttctaactgtgttatagactactaaatattaacccctcaaaagaggggttaatattttaacctgtgaatgaaccagatccgtgtgatactatgatagtaggcgaagaaattgacgcacccctgttattttgagcggacactttaatacgcactgttacgtttggacctgttacaaccgcagaatgcatgataagtctctccatgtcttgcacggatgaaccactctcattgccgttaatgtcgattgttcctgcaccattacctttaacgtttgctataacacagacgtgtcttgcgtgcccagaactggatgaatcattataagtcattaccttttctaaatatccgtcactagaccgactcacattcgtccctgtgtgcatatttgcaatgtccccgataaaactttgggcttccacagtccctttgaatttaccgcttgttgcttggatctcaccagtaaagctaccgccactagcatatactacacctctgacggtcacattgttgaattcagcatctccagctttattcaacttccaaccagcagaaccagctgcatagttgttggactggatatagttaccgatttttgcgttctcaatggtgccgtcctggatgaagctggcccggatgaatgtctgcccgttctggatcacgaacggcaaagctacgctatttccggctgccgtggtgacggcgaagcggtcagccaggaagataacctgcgactgcatgccggatggcgtattctccacgccgatacccatccccgcggcgtaatactgcccgttgctggagacaccaaccttgatgttgtacatcgcgctgagttcgccattaacgttggctatagcctgagcgttagtggtgatggcggaggtatgcccgttcacggtcgccgtgatgccgtttatctgcgtggcggtggcctgctgatagtcggagagcgtctgattcaggctgttgatggatgccttgttgccgttgacgtccgtctgcaggctcagcaatgaacgtgctgtggcttccttctcactgacgatcacctcgtcgagacggtccagattcgcgctgttgccggcgaccgatgcagaaagggttttacgcgtggccacctgagcgaggttggcctggattatcgcaattgcagagttcttcaccccgcccgtcatgccgtccatagaaacgctgatgttgtcgattcgctggcccagggcggtatcagccgtcgcaacggtctgctcaagctgactgagtgaagacgaaacattcccgaccgtgctggaaagctcattaacgctggtctgaaccttcccgacgtcctgggcatttttggcgatatctttcgcttgctgctccagttcgtcgttggcctgtttgatatcgttagccatgccagcaattttttcgttgctgtccaccgcgttctcgatcaggtctttgaacgtttccgactctttcatatcctccagaatgtcattagttatttcgctgacatctatcgaggacgtgcccatgatccagtcggtccagtccccggcgttaccgatacggtcaatcaggcgcgcgcggtaccactggcgaacgccggcaggcatggggccatgctgataatctgcagccgggtacggcaccaggaccagcagttcaggattggcgtagtcggcagttgtggcgcgctgaatctctgtataggccgtgtcgcctgagccatccggaaatttccaggtcaggtcgatatgccagaccacatcttcggtcgccaggaagttgagcggagtacccggttttcccgttttaccggagagataagttgtttcaccgtatccccatggtgacgacgtatcctgcgcattcagcgcccgtacgcgcacgtcatagctgcccgaataaatgccctgaaccgagaaaccctgcgcgctggtaaccggaacgtttatccagtccccgttgtccttacgccactgggcaacataccggattgcgccctctaccttatcccatgacacgtccaggcttgctacagtcagcccctgagacacatgatcgctctcagtcaccacgatattcttcggagcagacaggacgcttatcggcgtgacggtgatcgggggagactcgacccgaacgccgtcatcgatgtaacgatatttgtttggatcgtgctgaacggccgtaatagtgaaaccgcctgtactgtcgtcgttagccgcgattgaggtgaccctgaagtactgtattgcgaggttatcactgtctatcgcccaaacagcgcccgccacaggaacctgactgaatgccgtagccaccgtcaccgtttttttatcggcgctcaccgcgctgattgtccgcgtctgggcttttccgtcgggaaggttaaccaccagccggtctttcgccgcgtagtctatttctcgatcgagggtaatttggcggccgttggccgcgcttatacggcccccgttctccttaccagagcggaaaggatcggcgacaccgataatttcagcgggcaaagggatataaccgtccagccccacgccaaacgatacggtcccgtctttggcattggagagcaatacccagcgaccgcgtcggtgcgcttcactttgcgaggtgcagccgattgcggtcagggacgtctgccggacgtcgtaacgttctacaagcgccgaatcgtaaaccccctcaacggtatcgctgtaatggttctgcggatcggaccaggacaccaggcaggagctgtagcgattcttgtatgagccgcccgcataagtaaacagcccatcgataacgtttgagacgttataaacccagtcaacatcgtcctgcgggacgtctgcctggacataaatctgatcgtttccccagaacgttattccacgaaataccgcggcgagatcgttaagtacctgccaggcgtcctcctggctctgaatgaaaacgttgcaggtgaaacgcggttcggtgccaccggccccgtcggaaaccatttcgtcacagtactgggcgattgaatacagcgcccacttatccaccatggacgcatccacgcgcgtgcccatgccgtaaatttcatccagaaccagatcgtaaaagatccaggcagggttattggaccatgccattttgaacccgccggaccatgaaccagaataggttcgggttttcggatcgtaattatccggaaccttaatcagcttgccttttatcttacaggtcactttcggcgcgctgccgttgaattggctgctgtccacttcgacatacaggagcgctgttaaaggataacgaagcttgctgtcgatgacttccgcatacgaaaacaccttgaaggcgttaaccagtttcgaatttgatccgctggcatcagccgtaatacgcctgaccctgacagaccagccggacgtggattttggcagatcgatacggtggtcacgctgatattccgtcgtggtctttccgtcaaacttgccgtttacaaccgttttccaggcgccgccgtccgttgataaatcgatcgcatactcggtgaccgtgcccaccatatcgccattatctttatagagatactggaccggaaggctgagcttgatacggatggcatccagggaaaggtttgtaaactggcgcgtccagggcgcggtggtggtgacagttgtgcccacggccagctcgttgtcgacctggggcatcccggcaatataggtctggtcctgtgtgcccttgcggaactcccatttcacgccgctgaagttgtattccccgctgtcgtttgccagcggcgtatcgttgagaaaaatgttctgagcggtcaggtcgccctgtatttccccctcagaaacggcaatgagcatttttaattttgcgaccgacagcagatcgtcaggctgctcaaccggagtatgtgaactgccacctccccctttggcaccctgcaggatggtttcttgtttaagaagctgcattttttcacccataaaaaaaggtgccgaagcacctttaagttagtggccgctggcctactgctgatcgctcgagtacataccggcgctgactatcgctccccctgcctcagtcagaccgtaggccagggggacaggatgccccatagcgacggtattgaccggcgccccgaaggcgtagttaggcgtgttgtccgtgctggaggatttacccgcgccgaaggatggctggggcgtgagcatctggacaacgccccccagcatcatcgacactccgacccctgtcagaattgacgtggcgctgatagctgttgcactcatcgccgcgccccaggctgccatgctcgcaccagcggtaaagaatgcagcgaccagcgcaacagccccgacaactatctgcaggacgcccgaacttttggccccctcataaacgggcacgatccggtacacgcttccaccgcgggtcatatcaaactcttccagcccgatattgttgccaccgttaaaaaaggcgaaacggatccccttcatatgagcttcagacatatattttttgaatccgggaacctgtgaacacatggccctgagcatctcgcgcaggtcggcaacatcaaactgaacgcgtttaccgaatttttttgccattttaccttcgagaataagcgtcttaaccatgcattctgtccttatgcctgaccacccggaccgttctgtcgcgataatattttccataaggcgttcgcgaagaaaggtgcccgaaaagatgatggagaatgatgttatcacccacatataccgcggcgtgattagtcaccgatgcctgcacactcatcatgatgatatctccgggctgcattgcaccggcggcaatctcaacgaatccctcacgctcccagttgtcgtcgtagagacgctccttgccgctctcccaccattcgtaaggtactgaataattgccgagaacaatgccgtattcgcgcagataaaattcacggataagcgaccagcagtcggcgtaacccagcacccactgccgcccggcataatcccggtcttcacgcggggaaatcgtacaaaaatccccgtccggccaggacatgatcccccactcaatccccgaccagtcgcactggatccggtccagctctgagggcaccagccgaaccacatccggatgggaatgaatgagcatgatgatctcaccgcgcgcgcgggcagcgagctggtcttccggggagagcgtgaatgtctcctcgggtttatcggcaatgttgcggcagggaataaagatttgttgctggcctgactgaacaatcaggccgcaggcttctttggggtattcagcagcgacgtgctgacggatagcatccagcaatttttcacgcatttttatttcccctgcaggtttgcagccggaaaaccgccgaacggcagcggcgcatccgggccgtgacgatcctgacaatcctgccggcggccgccacaaacatctttcgacgggtcatcggtcggtgtaccgtctttggtaaagtatttcgtgccgttgtaatcgcatccggtcccgcttcggtaccagccccgcatacaccaggtgcagacaggcgtaatctgccgtgtcggcagctgcaggctctgaatatcgaaaggagaacacagctcgaaatcaacctgtacccgcgtctctgcggttttagcattgacgtaaaagagctgtaagcgctcatcggccgggctggcacccggattaccgtttttccagttggcggcatcgagatacttcgaaagcgtggtatggattttgaccttagccctgaccatatcgtcatattcaagacacagcgcggtgacatagtttccgacgttcccgacggacagcgtgggcgttggctgggaacctgtactcgataactccatccccttaagttcgtagggatggggatcgtactggtttccctgccagataatggcgggcagattttctgcggcgaaggctgcccacccctcttcctgaatattgtgcgcatgaaaacgcagcacctgatccataccgaattcagtgccgtcgatctcaatcagctgaataacgctgccgggctcaagctgttgtatgtctgccgtaaaactcatactccccccataaaaaaaagccgcccggaggcagctttcagtgtttttcgagaaaatcagggcgcgaacgcctgttcaaaagtgaaggccacagtggcttttttcccggtagggaaagaaacgctgaacgaatcggccttcattctgaacagctttttttcaccccatggagtggtccaccagaacgatttagtaacgtgagacatcaggaaagcgcgcagcgcagccgcctcctgtctggtgcccgtccagtccaggttccacgtttcctgtttgtcgttgatccccatccccgctatctgtttgtagccatccccgaactgggcctgcagcgttcgggctgtttcagtgccctgcgctgtttttcgcgtgcgccaggtaaacgtgtccgtcactgtgtcctcctcgaataaagcacgccgcccgcggacatttcttttttcagtcgctcggtgattgtctgctgaacaatcgcctgcagctgtttcgccgtccccgtggcgttcgcctgatttatgcttccgtcactcccctgctggctgatgctgactggggcataaacactgatcccgcccatgccagcaccggctgcgttcccgccgccgaccagaccacccgaggcatacccgcgcatcaggcgatagagattagccacgccgatgcggctggttgattctttggtgaagacgaattccccgcggtgaacgataccggctggctcgtacttgccgccgtgcccggtaaaaccgcccacgtcaaaaccctgtggccggtatgacgggaccgcgaatgactgaccggcagaggaggttttcgccccgccgctaacccagcccattgcactctggatggtgtaagccaccagcagctggttgataacggacacaatcattttaaggatcgagctggtgaattccctgaagctcgccttcccggttgtcgtcaggctggtaagctggcccgccaacccgctgaacgtagcctgagaaatctgctgaacggagctgaaaacgtttgtcgctgaatcctgatattcggcccaaccctgtttcgcaccggccagccagtttgcacgcagggcatcttcagcttcgaacgtcgccctttgctcttccagaaccttttgctgcgcctgagggttgtacgaatagctttcgctgagacgctgcagcgtagtttgtcgcccggcttcccgggtggataacccctcagactgagcctgcaggcccgccctggcggctttttgctgctgctcaaacttcacggcctgatcggccagctggttgagcttttgctggctggcaaccttatcgcccaggtcggccagctgccgcttgtactcgagcgtttcttctttgtgcgccagcagggatttttcctgcgccgtaagctgacgacgcccagcggcctcctgcagaacggtgaactgattttcagtttgccagagatcctgacgctgtttacttatgacgtcgttcacgctggtatgctgctcaagcgttttaagctgggcctgaagggtgagaagttcggcctgcgccttttcctcggctttgtccccggcgggcgttgagtagcttttgcctttcggtgtttttggatccttccactgcttttcaatcccggcgcgggccgcggcaatgtccttttcagtccacagcgtggcgacaccgtctttcgcatcctggcggtttttctcaataagctgactgagctttttctctgctgaagcccgcttttctgccgccgtcgcgccggactccaccagctggttaaactgctgctggctgcggattgcctgagcctgctggtccgttcgcattttttcccgcgcggctgccagcccttcctgggcgtattgctgatcggcaagatcgtaagcctgctttttcagctccacctgctggcgcgcgtttctcagcctttccgcatccgctttctgcagaacgttgttaccggcataatccgggtcgaccttaagattgctggacagcgcgcggtactctttctctgctgcctgccactcagcaaaagagtcctggcgcttcatcgcggtgtcaggattacgcccgacgcccagcatcgcatcccacgcaccggaggcggcattcttcacccagttccaggctttttcgagggatccgagattatcctcgaccgcaccggcgcgctgaatgaccgcgtcggaatatgcccgcatggccagctcggcagccttctgagaatcccccagcgcctgagcagaagctatctgttcatactgggtggctgtcagaaaatgaagggaatcgttgagcgtcgcgaccgcgttaaccggatcatccttcaggcgtttaaactgatttatggtttcgtcaacggcctgcccggtagcctgctgcagcctggcggcaacattgctgaccatgctgacgtcattaccgctgaacgcgccgctgccaacgacctgcgccagcacgcctgcagcggcatgctgagtgatgccattacctgccagcgagcgcgccagcgcctgcagctgccctgacgttttccccgcgtagttcccggtcaggatcagctgcctgttaaattcctcagactctttgctgccgtcgtaccaggccttacccaacccgaataccgccgcggcaatccctccgaccatgctggcgatcccaagaccgcgcagtgacagaagctggtctatccaccctgcccggttagccagcgtgatcccggagccgcgcagcgcgccgaagttaccgcgcatgacctcgccgatcagtattcccagttcctgccgggcggcggcactttgcagccccagaccgtgcgtggcgactttggcagcttcgagcttgcggatatagacttcagccgcatcgctggcaccgacctgcgccgccttcatgcgcagtagctcggtaccggagagcttttgctctgcaacctgttgcttcagctggctgaggaatcgcgtgcgcgctgcggccgatttttcctccacgatctgcagttctttttgacgggccgtggtgcgggaaataagggcgagataatcctgctgggttatgttgccctgtgccctcgctgcgcgaaagcgcgcctgcacgttcgcaagcgactgtgtttcaccattgagctggcgtacgccgtcgatctggcggaaaaatgatgccgcaagttcatcctgtcgacgggcaagcgcagcggcctgcccgtcattctcacgcatgcgctgattaagctcggtcacgcggcggtgagtttcatcaacggactttgaaacgttctgccagtctttggtaagcccttccgttgcggccgactggcgggatttcatatctgcggcagccgccgcgccagcgtcacccacggttttaaacgcagccgcctgccgctctgaagcgcgctgcattcgcgtctggactttttcagagtcctcagccatcccggttagctggccctttatgcgggcaacctgctcactaaacgtggcgctgtcgacgtcaaggttgatgaccagatcgctaatctgctgggccatatcggatacctcctgttatcccctcagctgcggccatcagcgcatcatcatccggctcgtcatcgctgatgacgataccggaaggagaaagcaggctgaaatgtgcgggggtaagttccgggtcgcggaagaaaagagtggagatggaataaagcagctctgagaaatgcgcatcgagctgagcgtcctgaaaataatgctcccggtagaactggtgccagtcgcccagctcagtggaagtcattccagccagcatggcgcgccagtcgggtcgcccgaactcgcgcgccagattcaggacaaacttcagctcgctggcaagggcttttccgccgcaacgggttctgcgctttcggcctccgctggggcatccggatcggcagctttgtcatcctcaaccggaacgagcatgccggagagcagctttatttccatttctgctttaccgatcgcctccggcggccagccgctaagcacctgctggtaaagcgtctccacatccgtgccagccggatcgttatgccacaaagacatcgcaatcaaacgcgcaccgcagcgaatatttgagccaatcagcctggccgtcatttcctgatcgctgatgccgtcgctgtcagcgctgacggccttttcctctgcggccataaacgtgatgtactcaatacgctgaagcgccgacagctcgaagatggtcagtgattctttttgccaggtgaacttctcttttttcagaaacatgcgtccttccttacgctgcagttacggtaactttgcagaccgcaacgaaattaccgtcgctggtcataacaataacgtcagcggtgcctgccgccacgccggtgacggtgatcgcattaccgctaacggtgaccgttgcttttgccccgtctgaggttgccacacggaacgaggtatctgaggcactggctgggttaaccgtcacattgagcgttgtggttgcgccgacggccacgcttgccgtggctttatcgagcgtaacgcctgtcacggggatattcggggtcccgctttcttctgccagttccggcttgccggtattggtaattttcgctgtacgggttatgacctcttttgccggaatggctttacccaggctgctgcaccagccgcggaaaacgtcgacggtaccgttcgggtatttgattttgtaatagcgtactgagccatcaataaaccatgcgacaaggtctttttgcccttcttcgcccggcttccaggcgagggtgaacgaggtatcgccagcagattttgccccctgggccgtcgcgttccagtcggcatcctcgtcgtcgaggtaagtgtcgtcatacgattcggcggtcatttcgcccggcgtcagctctttaattttcgccaggcggttccagtcgatatccgagagtgggttagcgaaagcgttgcccgttccggtgtaaagccagagggtggtaccggcacctttcacaggggccagcgggtttggagtaggcataagtacctcttaaattgaataggtgattaagtacgtgaaatcgactgaaccccaggtggccatttcatcatcccgctgatagtcataaccctgcggggtgaacgtctcgaccagttcggtcagacctgggatgaaggccattgccggatacactttctcttccatccaggaatcaagcgcgctgtcggggctggaggctttaagaaatacctcgatgtgaacaaccgcctgccacgaatcttcgtcaagcgaatcgccggtgtactccgcgtcagaaaggtatacagccacggcagggagatcctgctcttcaagaaaaacagggcgcccgtcaaaccaggtgaccgtgtcggtgatctcggctttcagtttggccagaatggctgcacgaattgcgctgtgtctgttcatcgcttcaggtggatcctcagttggtttttcagggctgcggaaagttctttgggcatatcgctttcaataaggcgctttgaaatagcggtgaaggccacggtgagcggtgtctcaagaggaactttgaccacatcaatcggataacgggcctgacctacgcgccgcatgacctgccagcgcccgttcgcaagctgttggataaaagcgttacgaaaggtatagggcccgattttaaggacgctgcccgctccgtttctggccccttttttacgcgagagcctgacgcgcgccgtgccgagctttatcgcaggaagattaccgcggttgatttttatcgacgcgaccgggcgatcgtgacgggccttgcgcagacgggaacgctggcggaccagacgaaccggaagcccctttttccggttatcatcaactgttgcttctttcgctacagctttgctcccctggcttatcgttcttctggccaccctgttaagtgcttttgcggttgcctcaggaacgattaaccggctgaggctgttcaggttctgaatagccctttccagtcctttcacagacatagcgcctcctcattcgagatggatgcggggttttccgttgaacatgtcatagcgggtaacgatcaggttcttaccgtcgtagtcgacgctgtcgtttcggcgtggctggtaaagctcagagaaaaccaccagcgaagtacctgttcccgacaatggccccatttcctcgagttgctcggcgggaacaacgtcatagctgctgccattgatgatcgctgtctttcccatcttttttatagtggccgcgtccatgcgcgccgccatccggtcaaaggagttaggcattgatcttaacttcaacaacggtggtgtttgcccctgcatcttcccaggcgatgcccgcggcaacggcgtccgtttcttcgatcgtgattttgccgtccttcagatacacctgcgccccggcagtaaccgcatctgcggatacttttggcaggaggaaaacaccctcagtaaaaccgtccccggtatcgccagccgggatatcggtaattgccaccgcgataagttttccaacaacaaccgggtcgccgctgtgaacatcggttgcaccactgtttaccagagggatcgttttcccgtcctgcgcatagttcttagccataacttctccattcagcccctttcgaggctggtttcaggtataaaaaaagcccttacgggcgtctgtttgtcaggactgttttttactgaccagaggatttggtcatgccgcgatagtccagcggcgccacgccagcatcaatacgcactttcgtggcgataccatcagtggtgaagccttcctgctgatcgatgtatggcgtgtcgacgccgttgagataagcgacctcaatggtgtcggtgcccttcgcggcagccagataccaggctttcgcatcagcttcatccagacgtggttcggcaatgacttctgcaaagttctggatagggttaacgatcccggcattgatgtctgcacctttaacactggccgacttgatggtctgatttgccagagtttccagggcgacgggcaccagcatgtaggccggacggatattcagggttcgctccccctccttctgcagacgcatcagcttgcgcgattcgtccaggctggccacagaaattgcacccgagctcaggttcttgtgatcggcatggaacagcgcctttccgtctgagagtttcgggtttttggtcagaatggcgtaaaccagatcgccaatcgttgctttcgccgcgcgccccatcttcatcggtacgtcggtaagctggttcagatcgtcgttgatgatcgcctggcgagttactgagaagatttcaccatacgtggcaagcgcgatggtttcgcctttgtcactggtagtgatgtacttgtactcagccccttcgcgaacctgtcgcagagaagggaacccacccataccgacacgatgcgccgttttgaagtccgacagctggccttttttggtccactgctcgaaggtttcctgcgcctcgtcccagccctgaatcagcgctttgttcgcaacatcaagcagaatgttgccaaagtcagaggtgctgtgggtcagcgccaggccaaccatctgcatcgggttgtagctggccacgccgatacctttttctgtcagggccatacgcgcatactcgcgcagcgtcataccgttataaacgttatcccgctcctgaccttcgaacccggcacgcgccatcagtgcctggcgaataccatccgcgacgaagttaccgttgcccgcatgaatatgcggctgagtggttttattggacggcgtggccgttttaccgagttctgccagcagcaaatctttcgccttatcgacggagcaatcagggtcggccacacactgattctgcagttccatgtgcttattaccgaacatggcaaagagatcgccgatagcgttaacacgggttttctgctcagccaacacctgcgcgcggatcgcattttcatccggtgccgggtctgtttttgcctgcggtgcctgaggctgggtaataaccgggtcacgctgggtagtgttgcgcggcggggtgatcatgttgcgaatgctttttggcattttttcaaattcctcaatacgttttgaatgaatacaggccatagcctgaagggatggtgtcacctggtcggcaaaacccagttcaaggcactcgctgccgttcatccaggtttcgtcctccagcattaccgcaatttcttcggtggattttccggttttctgtgcataagccgggataagaacggattcaaccttgtcgagaagatccgcatagtcgcgcatatcgctcgcgtcaccaccagcaaacccccagggcttatggatcatcatcatcgtgttttcaggcatgatgaccggattgcctaccatcgcaatcaccgaggccatggaggccgccagaccgtcgatatgtacggtaatcgccgcgccgtggtgcttcagcgcgttataaatagcaattccgtcgaagacatcaccaccgggcgagttgatataaaggttgatgtgggtgacgtccccaagtgcccggagatcattgacgaactgtttcgccgttacgccccagtacccgatttcgtcataaataaaaatgtcggcctcactgttattgctggcctgcatgcggaaccacgaattactttttgcgctggctttcggacggtggcgcgcccggttctttggcttcggcactggtgcctcctttatcattggcggggtcggtgtcaaacaccaggccctgttcacggttctcgtcaacctcagctttacggcgtgacttaacatcatccgggttgcgaccgctggcacgtatccagtcggattcagtagcagcaccgccgcggatctgcgttttccaggcattcgcttctttaacgggatcaatccacggcataacgggccccgaataaaccgcgttataaagcgagtccatatcaatgcctctcggcagcttgatttctccggcagcaatagccatcttgagccaggctcggtacatgggccgggtcactgaaccgatgaaccagtcctgaagaatcagatagccgtcggttgactcgacaagctcctgccgctgggcactgtacgttccgttgtagtttctggatgtgctggaaaagctgaggcgactgccggcggacacggcacgcagctgtccgttacgaaaagattcgaggttagggttcgggcgatcggatttaatcatcccgatttcttccccggcctgcagttcgtcatagagcataccgggctgaatcatcagctcgcggtcatcgctgcttgaatcagaatcgaagctctgtccgtcgccttttttgatatacatgccgagtgccgcagcaattctggcagcagtaagctccgagtcctcgtattctttcagcgcgctcagacgcatcagaacaccagacaaaagagacgttccgcgggtctggtgcaggcgtcgggtgaatttgagatgcagcatgttctctgcatctatctctttggtatcaaactgacgcccggatactggcaggcttttatagacctgatattttttcgggcgtccccagttatcgacaaaaacgccctgattgagctgggtggcagcatcgctgttcatcggcacaaagtccggctccagcgcttccagccagaacggcacgccagcaaccggctgaagaccatttccggtaccgcgaaccagctgagcaaatacctcaccgtcccggagccacgttcgcagcatcagccgctccagcattgggcgggtaaactgggttgtgacatctggccttacggaccattcgccccactttcggcggatatcagtggccagctttttagcgatcttcccgttactcagcatcggatgcggttcaactatgatgcccttcgcacccaccaccctttcttccagcttgtcgaaaacgccgatcaccagatcgtggttgttatccagccagcgcgcctgctgcctcagcgaaaccgcccccatctggctgagctgatcggctgaacgattttccttctgggctttgtgggtacgcgtttgctttaccgcctcatacgctttaataactgcgcgggcacgcaggcgtgaggctttccagcctggtgaaaacaggccaatcgcatcatctaaaaaactcatccaaacctcgccagcctgtagccgggtcgcccacggcgtttgttattgagcgttgccagtcgtcgctcccattcctgacggccttttctgatttccgacaggttttcgagcgtcatctgctgcccgttgaaagtgattgatttcccctccagaacagacagctcggctgcagcatagcggtcgatcatgttttgaatatctgctggattcacacccaacctcctgacgaagaccacggattagcctgctcggttacgggcttctcacgttttggttttggtttagatttcggcgcaggcggcggggatggcatttcgccagcttccgtctgcgtgtcctcgatccacgtttcccgccgtgcccactcaggagctgacggccatttgattttttcgtaaccactaaggatggcgagcgcgtcggcataaacgagcaggtcaaatgcttcgtttgcgccccggccgggcttactccatttcccttcattcgagcgttcctcatacgtcagttcgtcatagaaccagctgcccagccaggcggggaaatgcacatagccagggccgggtgaatcacgccacagcgcattattcacccggtctttaagggcatcggtctggagaagataaagaggcacatcaccagtcgcctgtgcgcggcgcgttgatctgcccgtgttgtcgggaaacgttcgctggataagtttgctgcgcctgacgctgtcccctttgaagagatagatacgcttacccagcccctcacggcgacatctgcgccagaacttgtaggcattatccgtcacgccatcttcgccccctgagtccacggccatcgacatcagccgcatgccctttgatgggtcagctgcgagcggccacgttttatcaaagacgtcagtgagtaaaagatcccagtcctccggatagctcgccggatccacctgaatgctttcaccgttgccgtcgcagcgcagcgaatgccggatgttgtaacggtcaactatccagcgctcacccatacttccataacccgtaatctgcacaacaaagcgccggttgcgcccggcctgcacgtccacggtcgcagtgagaaactgcacgccgttcggtaccgaacgttttgggacgtcttcggcacgctgctcgagcaattcacttttacgctgctccatgctggctcgcggcaaatagggcctgccgaaatcggtgttgatcaccgtcttcagggtttcttcgctgcgcgtggattcatattcctgctcggcggtcagaaacttataaataagctgcgcccaggtctggtaagcagctgccggaccttccatccagaaggaggcaatacgggaacgacggccatcaccgctaaccaggcctttcctgtcgatggtttgcccgtcccggagccagacacatttcatgttaagcgcacgcttcatgtccggtgtgatcctgcctttacaggcagggcactgaagaaacgccgcttcgctggcaagcacaggatcgctgctgtcgcggtatccggtcatattgtccatttccggctggaaatattcgccgcaatgcgggcatggccagtaaagacgacggcggtcaccacggttatagagcgataaaattccggtggtcggaggggcttcatggggcgtggagcgccgccattttgtgtctctgatatccctcccgggcgagctctcaaccagcgtcatcccggaggacatgaatgtcgtggttcgtttcgatgccagtgaaaaagcatccccctccccgtcgatatcttccggaaagcggtcataatccgtcagcgccacacttttatagtccgaggacgacatgatattgacggatggccagcccagcttcagatagttaccggcgcggaatgtacggtcgtagacgttgttatcgttacgtcttgggcttagccgggttttaacttcagggctacagcgaaaagtacggtccaggcgttttttggaatgctcgcgcgctttttcctcagatacctgaattacaagcatatctgccggatcgcagacaatgttataaacgatccagccgtcaatcagcccgatggttttacccgttcgcgctgggcccacaaacacaaccgcatcgtattcacgcgatgccagacagttcatcggctcaatcacatagggtgccagatccggatcccacggaactgagtttcccgcccccattggcacgcgcatataagtactgaccgcatcggccaccggcatacgacgcggggctcgtaaaataccggaaacatcgcggcggatgtccctggcggatgcccgctttgccatcagtcctcctcaggctgctcctcctcttttccagcgtcctgcaccttctccgccatctggtcgcgcagatcatcgataacgctttgcacacgaactaccgcagcaggcgttaaagcacagtcgcgctcgagcacatccgggagggtttcaagtaccatgacgacggctttcgccatcaatgagaattctcgcgccacttcatctgcgggtattaactgccccgtatcctgttcgaacttcagcctctcgttctctgctttccagtgggacagcctgtcagaagggggcatatcgtcgatgttggccgaaacggtagggatcatcagttcggtcagaatgtcggtcaccagatagagctttaacttgctattgctgcctggagcaggttcaacatttttcagtctcgcggcaaccgtctgacggtgtacgccggttatccctgccagctggttgatattgagttttaaagtggcaatttcctggtccatgatggtgaacactttttgaacgattcgacatgttgcgaaaatggcctctaattaaatcaaagacctgcgcacatgatgatgatgaccctggatccgaaaaactagccgtttcccgcgagcacgccgccccgtggcagggtccccctccgggagtaccttttgataataattatcaattgcacactatcgacggcactgctgccagataacaccaccggggaaacattccatcatgatggccgtgcggacataggaagccagttcatccatcgctttcttgtctgctgccatttgctttgtgacatccagcgccgcacattcagcagcgtttttcagcgcgttttcgatcaacgtttcaatgttggtatcaacaccaggtttaactttgaacttatcggcactgacggttaccttgttctgcgctggctcatcacgctggataccaaggctgatgttgtagatattggtcaccggctgaggtgtttcgattgccgctgcgtggatagcaccatttgcgatagcggcgtccttgatgaatgacactccattgcgaataagttcgaaggagacggtgtcacgaatgcgctggtccagctcgtcgattgccttttgtgcagcagaggtatcaatctcaacgccaagcgtcatcgaagcgcaatattgctgctcaccaaaacgcgtattgaccaggtgttcaacggcaaatttctgcccttctgatgtcagaaaggtaaagtgattttctttctggtattcagttgctgtgtgtctggtttcagcaaaaccaagctcgcgcaattcggctgtgccagatttagaaggcagatcaccagacagcaacgcgccacggaaaaacagcgcataaagcacttcattagcagcgccagatagcgtaatgattttgttactcatggaatatttccttttaggcgtgagcctgtcgcacggcaatgccgcccgagaggtaaacgcaacctaacggcatcacccaggctcactactgaaagactctctttgatgtgcgcgtgcgatgcgcgtagaagactgatttatcaacctgtctttatatcaggattcattacctgactatttgtgggtaaagttcgtagtgcgctgatcgtgcaaaatgattttagttgggaacagttcgcaactctgtcccataaaaatcagcatattcccatctatcccatatccagcgcattgaccatcgggatactgaagggagattccatcatctcttagaaagatcaccatctcttttgtttcaatttgcatatagctacctggaggatttatgaatgcaaggattttcatggactattaccatgagattgattttccatctttattcgcgagagcagtggaaagcgatgacgatgtgggtactacattgcgcattcacctactttgtgagcgcatggtcgaagcatggatatgcgcatgctgtgactgccaagatctctttggaagagataaaaacaaacttttaatcgaatgtaatactaaaatatccatggcgggaaacctgggaatccccccggaacttatgaaatcacttaaaaccatcaactcaatgcgtaatgaccttgcacacaatccatcaatacaaagcattgctgattcaaggatccagagcctgaaggatactctgactgaatactttaaacagcatccaacggaacccagcatggaagaatcaaaactgggtatttttaacgccgagaatcaattaaccgaagaagtttccttagatagtgacagttcaaaaaacagacttaagttaatcttgctgttcagcaagttaatgcaggcgttaatgcaattagttgcagctaatcataatgggcgctgggataaccaatttagccaattcgtttaccatgtgaccatgaacgcaacaaagagataaatccaagcccgttttgtacgggctgttgcattatcacaggcactcagtgaatgcctgctgtaatgccgctagtcgtcgagttgcaacacaccgtgatccagtgattctgaataggcgataagtccggtataaccggggataatctcaccattatcagcttcaaattcaggaattgtgccggtggtgatggtgtattgaggctggccatcttccttcgcgaaggctgccaggtcttcaatctgcttagctgtaagaactactgtcatgctcattcctcagttgtaaaaaagccccgcgagtgcgaggcgatttgattgaattctcggctcttatctcagcgcagccccttactgcgtgccggttgctcggtgatgagcatcagcgatgagacattaaagccgaccgaaggccagcggcgttcctcatgttgccgacagagccatatcgacaagaggacgaaaactagcagcatgaatcgcctattggttattcgacagtcgcactgattcgtaaatccgctcacacgtcattcctgcccggtagctttcgtcagatcgtccagcataatatcgagctgcttctgcaaggcttccgagcatgtcggcaagcattgctgcgttggctccggctgttttgcttctgacggaagtggcgagatctgcggtgtgctttgcggcgtccatgtgggtagcgagttttgttgcttcggcgcgcagctgcttaacagtggtagccaggccagcagaagtaacggcagcgctcgctgcttgagcttgagcatctttaacggcctcatcccgggcgattgttcgcccttgttcaatcatacgagctgcggtctgtgcattcgcttcctgtgaagattccgcgctatcccggtcagcccactttattttccagctgcggttcgtccactcactgccagcgagaaacgaacctaccaacgcaacaatcacaatgatgcagatgccacccggcttcactggtctatcccccagcacgtcagtgcgctttcctggtcccgccgttctacctgcccataacatccatccttctggcccttggtcaggcggcaatcgcggccaccgtctttaatccaccagcggatagcttcacaggctcctttcgtatcgccagcattaattcgcttatagaacgtagacgggaaacattttccggggccgatgttatatgggcagaaagaagcgatacccgctttctgtggttcggtcagtggtactttgatatttcggtcaacccacgccagcgccttgtcgcgttcaatggcgtttacctgggcgcatttctcagctgacagcttcatgccctgtactactggcttgccatcaaccattgttgcaccacggcaaatggtccagagtccgccgccgtcgcgatatgctgtcaagctgttaccctctttctcatccagaaactgatcgagaatcacgggtgcggaagccccggcaagaatcaaaccaacgaccgctgcgctcaatttattcttcagctttagagacatagccattgcgccgatcctcccgttctttccagcggaaataccagttcactgcacaggtgattaccgtgcatgcgataccgacaataattgcccagtcgctcaggcttaaccctgcaattctgtcggccaacatccaggacacctcttttgctgttttagctgtttcggcatatgccttcgctgatacaccgcagccggcaagcgtggttcctgatccatatgaaagtctgctgtaaatggtgctcattctggtcatagcctcacctccgatagttcggatggcgctgtgtgtgattgaaggggatcaggcaaccgggctcttatgttcaagtaaaaattaaggatgattcccggtgcctgaagatggtgatcaccacagcaacgggggagcgtggtgatcgttatgattttttcagtttttccacctcttcggtggtctgtataaacctgtctgcctccagttctacgccgatcgcccgacggccaagttctattgcagctttcacagttgaaccagagcccataaagaaatcggcaacgatatcccccggtctgctgctggcgctaatgatctgtttcagcatgtcggcaggtttttcgcatggatgtttgcctggataaaactgaacaggcttatgtgtccatacgtcggtataaggaacaagagcggaaacagagaagcagcgccgaaggattttgtattcctccagcaattctgaatacttgcggtttaatgactggtaggtagccaccagctggtggtgaggatgttcaagcttttgctgaatatgtttatcgatggcgatccgcgtgaacagttcctgcaattttcgatagtccacttcattcggtagttgccattggcttgcaccaaaccagtgtgacgccatgtttttctttccggttgcctcagctatttctttcgagctgacacccagtgattcacgggcattacggaagtaatcaatcagcggcgtcataatgtgctgctttagctctgtgcttttcctttcgtaaacatcctctttacctgtatacggtccaagatagtgctcagcaaacaaaatccgttccgtagatggaaagtacgcacgcaggctttctttattacatccattccagcggcccgatggttttgcccaaatgatgtgattcaaaacgttgaatcgggcgcgcatcataatctctatatctgaggccagtcggtgaccgcaaaacaggtagatgctgccagcaggtttaagaacgcgagcatactcagccaggcagctatcaagccagcgtaagtagtcctcgtcccccttccattggttgtcccagccgttgggcttcactttgaagtacggaggatccgtaactataagatcaatagagttatccgggagggtggcgacgtaatgcagactatcagcgttgattaactcaacactgtttatttttacagtatttttcatagatcagtaagcgtaactctgataggctcacgttgcttttgcgctaaagcagtgggccttggttagcttgtgacctgaaagcatgagctgatggctggccgggtgcgctaacacccaccagccgcccatttccacagcagaaaacccccattactggaggcgtttataacatccgaactggtaatcagataaccccgccatcaccagctgcgtaagtatgagctggcaacgttcgtggctgaggtgggtattctgtgcaatctccccagccgttgctggtttatcgcttaattcattgaaaacagcctttgccgtttctgtcatatcttcctgatttagcatgtcttttacctaaaattagttgcgtgacatacagataactctggttggtgataccagcaagagaagaatttgattctgcaaccaacaaggcctttaggcatcaggcaggaatgagatgcaataaaaaaaccacccgaaggtggtcttatatgaatctttaacgcggacttagcaaatattccacatcatcgtactaccgttatggttttcgataatttttgcggctgggctagtaccaaaagagtgcatatagcaatgatgaatagtaaggaccagatcctgcaacgtttggtcactctctagctccatgatatttaaaccaatattttgagctttgtccaaatgaatatgtctggcatgtgcatacgttgcttggtggttgtttaactcatcacatatacgcttagccttagcttcagcgtcagcctgacctgcgaacataccagtacaaagccatttctggacaatttcgttcgcccagagaattgctttttcacactcgccaatcaacgttggatttagtttttggaacgtaaattgccaccattgcagtgcagcagggttggcaaaaatttccgcttttgctctctcatactcctcaataattgcatgagatgataacccattaaactgtggatcaattggccccaagttcgactgtttacctaaaacgatctgctcagcacaacaagcaagcattgtgccacaactcattgaaatcataggtacaatcgctcggatattggttccgaactttgaacgaagataatgaccaattgattctagagctgcgatatcgcctccaggagtatggagtaagatatccaatcccagactcgtatctaacccattgatagcagacataagaccatttttatcatcatctgacatctggatcagatgttgaaacccaggcccccctttttgaaggaagcctgagtaataagaaattacatttcggccagtatgtttcgataaatcacgtaagtacttgtggcgaacctcatccgctggtgtacgttgagcgatagtacccatctcacccaatacgtctatccaatttggcatgttatcaatttatcagtatgagtacagttggtgagattgctgaccgttctgctcagtagtatttggtgttactgtgctgtatgaatagagcacaccacttctcacattcagatcgttttgctgagcgagaacacgcatagcaaaatgctgtacggattcgcctttttgaaactcttggggttgtatgcccattttttcgtaaaattcagcagcgctcatgatatgtccctcgtttttttctacatctatgcaattccaggagccatcaacacaagatgtagtagttagcagtcgtcaaatacacgaaaagcctcaagatgaggcttaaaaagattctttttgataaagatttagccaaactatagcggtcaaaatgcagatttgacaagtataaaaagcacttaaagcctataaataggcagtttttgagaattaaagcatctttaatgaggttgaacaaaatgcagtcttgacgctgaacaggactttactggaacgtagagctaaatggttcgatttcatgaaccagttacaaaaaaacccgctcatcggcgggtttataaaactttggcaacatatcaaatatgcttcaaatatggcttattttgttgcattttgcaagcgtgtttgaaggagatggtgaaatttacttcacatttctgccactttgagggcttcttcttcctcatagtattcaagagccatggccaacgcagattcatcaagctgggtaaaagcggcctttaacccagcccagtgccctgaatagacacgcaaccatgtcgaacggtcaacgctaaccatgcgggccaacgctgcaccagcatagtctttataggtttcattatttctggttgcggcaatttcctgccctgccagccataccaggcctatcagtttctttactacgcgctcctgaagggagttatcacccaggcatttctgataagttttccagacgtattcacacatcatcacctggtgcttatagctaaggtcaaaaccgtagcagtaccgcaaccaggcctgctggtatccactaagcgcggacactgccctacgccacggcgcggactcaaattccgcatcttttatcggcggcattggcctgcggcggctgcgtgtttccagcacatacagtggcgcggaaagtgagttaacaaagcgtggccccttctctccttcgagttcgacgagatgaattccacggcgaggggtggcatttttgtctgctggtgggtgttcactgaaagcctcaagctgcccttttgttcccccagacaggtcaggtagcgcgcggcgcaattctattcttacaaaattcaggtcttgttgattcatgcttctttgcgctccatacacttaagctttcgcaattacgccgatcgccagcgcccgatccataaaacgcagtagcagctcaagctgcgtaccatgcttctgctcgaatgccggtacatcggcgtgtaactcgtcgtggcactctctgcacagagggatcacgaagagatcatgggcttttgttgctgtcccccccataccgtgccctacgatatggtgcggatcatctgctggccgtcggcaacactcacagggttgtgttttaacccagcgggtgtacgtctcatttatccagcggcgtcgctttggcctgagcatgaaagattctggagactccggatcaacagagagcgtgaggatcttcttcgccttctcctgcacgaggctggttgcagaagcggaaggcacaatgtcgctttccctcatgaccgagcggatcttatcatccggaaggcgtagccccttgtgcgcaacgctttccggaataacatcagccaggtcgtttctgaccatccaccagcacagttccggaagcgtcaggatatgcgactcgggaaaaccagaatcacgccgaatgacttccagaatccaggataccaggtttcctgccgctatacctgcaagctgttcggtatgctgccccgacaaagtgtgatcgcaatgccagcacaggcgaatacttcctggtgggtgccgcattgttgtgaagttcttgtcgtgccacgatgaatgtggccactggcattcaaaccgattactcaaccattgctcaagggaaggaagcccaccagcacgctgaataacccgatcattctcgaagacctgccgcattaccggatcatcagccagcggctgaatggcggcgggaacagctcctgtactgaatgacgccatttcttctggttcaggctcaagcagaacgcgaccgcgcataaagaggtgcatcagttccgcgccgggacgaaacaacacaatccccatacgatgggcgatctcgggggtaagcagagctctcacgcgacctgccccctggcaatgtgttctgcccacagtccaccaatccagcgcacgcctttcgccgtgaaacgtgcctggctgaatgcatgatttgaggttacggatgtgccggttttcacttcaaaacggcccgcatcaatatgctgatgccgtggggtcatcgttccgccaagacgatacatgatgtcgttctcaaggaggaataaccgcagatcgggctctttggccttaagcagttttgccacctggcggaatgacattgacccactggctgtacagtaccgatcaacaaacgctaccttcggcgccgcggcagccagttcgttagtcaactgctgtttttgttctgcaaggtcagctgcaagacgtagggcttcagagaatgattgaggaatcgtctgctgctgtgcctgctcaagctcctgccagcgatcaaccagacgcgcggtaaactccggcgacagctgcgcgacaacgatataactgtcccgcttccctatcagataaaccgataccgactgattgaggtgatttttaacttcccccattggggggagttcaataacaccgcgctctgccaggcgttcaatggaccgtttaacatggtcatgtcttgattccaccagctcagcaatatcgctgctggacatggttaacgctgttgttgctaactggctcatacttttctccatatcaggcggctgcacccgccggttcatatctgctgattgttatctctacccgacctttcggcacaacgggtccccattccaccagcatgcgcttaatctggctgtcgtcttcccagacacccgcatgcgtcagcgcgtcaaacagggctttgttgtaattatcgatatcccggcggcgcgcatccggcgggtacagagtgatttctaccgctgccagttcagtcgatggcttcgggagacgtcgtaattgctcaatgatcgccacgcaggcagcgctctggtatttacggccagcggcgctaatgaggtgacgaccggccagcggccccttgttaggggcgcgccagtaagtgttcacgctcggaggaaaaggcaggatcagtttcacgcggcctctccccgcatattgcgaacaagttcagaagcagcagtaatgatttcgctggtggcagtccgctccagccagagttgattgatattggctttcagcttgtgttgcagtgactcatccagcatgtcagcaccatccacctggtcgaatacaattctaacctccagcggccagatacgggactcgggaagcggatccgatactggtttagctttctcacgaatgtgcatgcggatctggcgaatattggaccaactggaaacatccaggcttcccatggctgcaatgaagtcagtgctgttcatgccatattcaccggatgcttcaagggcaacagtgcgaatacgttccgacatatccaggcgcacagcagcgtcatcgaattcaatcgacaacagccactcatccacaccgaacaaaatactctcacgaataagcagcttcgctttgtcgatcgttaaaggtgatacctgagtgaattccggtgcttcgacagaatccgccgcccaggtatgcccaaacttcgattcactgaatgtgtattcttctttatcgccaaacgcagctctaacgcatgcccacgcctcgacaccgctgatagcaaaaatatctttctgggtgagtggcaactctgcttctggcttatcagctgcaggaggtgtggcagttacaggttgagacttgctggcagcaaattgtgccaaagccataaacgcccgcccttttgcctccagttctgtgcggttgatatagctgaaccgctcgccacgccatgacttatcgaatacagctatggcaccggcaaaaaacgcgctggtgggtttctgtttttcgtcagcaggtacaaaccacacaggcagatcgaacccaatgcgcccgcgaatgaatacaatgtgatcggcatcttccggccaccacgtttcactcggcgcggcttttatcaggaatacatagcgaccgcccttctcgcgctgggctgctgcgtagttcatgatgtgcgtcatgccggtgatcgcctgcttctcgtggtactgcgaacggctatacggtgggttgccatagccagcgccacccagttcagccagacgttcagaccagtcctgcgtcagcgcgttatcttcggcggtgtaccatgccgggcatttcgcgttgtcgtcgtcagcaaacaaatccagaactaatggaccaaatagcgcgttgatcccccaaaaaagcagatccggtgtccgccactgatcgccaacctctttcaattcgtgagctggtttgctacgcagtgccgccagcgcctggcaatatttattggtcatcatgaacggaaccccgaattttctggcagtgagtaatcaacactctggaagtttgcgcggctggctgagttagtctcccatttgccgttaacgcgttcaggccggccagcactggaccatttggtcgcgctttgcaggtaaccagggaagttttttggaatgaacagagttgccgggcggaggtattgcgcctgctcgctatcacgccaatcggcatttttgtaatccactaccaagcacaggtcatcaacagtgaattgttcccgaagacgggcgcgaatattctccagcgacgtgctgcatacctggtagcgtgagccagtagtctgattcaggtaagacaaaacctgtctggcctgatcagtaatcacaacctcagggtcgggttgcgccgcaaccggacaagagggttttgaagttacttgtggttcttgttttgattttactgacggatccccaccagattctgacgggtcaaaaccgccttttttgctggatttcgacgcctcaaattttgacgggtcggattttgatgcatcagattttgatgggtcagattttgatgcgtcagattctgacaggtgagaaaaagcagcctctcgcaacttaacgacgttaagctgatatacgttcgatgcgttacggttcccattacggcgctgcttacgggaaagccagccatccttctcaagctgagcaagggccgtccttaccgtactttctccagcaccgatttgacgtgcgatcgtgccaatagacggccagctaacaccctcatcactactgaagtcggccagacgcgccatgatggcaacgctggataacttcatgcctgacgaagcgcatgcatcccatacgtaaccggttaatttagtgctcatggtcgtcctttaattctgtaaatttacgctggaattgttcaagagggctgaagcactcatgatcgtacccttcgcgaaggtatataacgcgctgtgtatctggctcccagcggacaactctgacgggaactccgtagtgatctctgaaccgccggttaacttcagccattcctcgcgccccttctcgttcatctgaacaaatgcttctaccatcaagtctgctggctggtagttgcctccatcagccgcgttatttatgatttccacatagccgaactgggcatctttacccaccagcggcaaacatctgaattgcttagctggtctgaatcggtttacactgttcatgcgttagtttctccactgatacgacacgccaaggcgcccggagctgcacactcgcgggcgtcaccttttctgcctgttgaaacgaatacgtcaatcgcctgatctgaaacaccaaccccataaagcgccataaatcccaggaacccgtgaatctggtggcggagcttcttactgaataattctgaaagcattttgcgctctgatgaatcaattaccccatcagccgctgctgccatcttggcattagccagctcaccagatgctgctgccgctttcatctcaatgctgtacagctcaacgttatccaggctctcagcagttggaacatccaccagccatttcccttttcggttcgcctggtactcggccaagtaacaagaaccagacaggtcctccatccgttccagttctgccaaggtaaagaaccgactgccacacttctggtacaggtggttgtggaactggtcgatagtcatccctaaatcggaagccatacctaagcgaccatgcttgtgtgccttacacatcaggcggattgctgtatttatgctgtctaccatgttgatttccctctggtagttaataatcaacttaaagttgactattgttgttagcggaaggtatgccgtcatttttgttcggataaatatcaggtcgtaattgatggggagttactacccatccgccccattggcagagttgaataactctttcagaaggtactcggttctttgcaatccagttcgcaacagattgaactgattggaattcaaaccgccttgatacctctgaaatcgacccgatcgccttcacagctttagctgttacattcttgtgttgagatgacatgtgttctcctatgactaagcctgcatcaatactacttatagtagcaattattagcaacttaaaatagaaatgacaactatgccttgtgcgcttaatcttctacttatggtggaaaatgctaaatacaaagactttgccgaaaggctaaacaggtctctccaagagcaatctattggagttaaagaattgtcagagttcagtggtgtctcgtatgagatggcgcggcgctacactcttggtactgcaaagccgagagatgagaagatgattcgaattgcagaaagacttgccgtctcaccggcttatcttgattatggtgtgcctgttaatggtggcgacgcgccagccaaaggcacggtcagaatagagcaattggatgttcatgcttcagccggttccggatatataaaccaaccattccctacaatagtgagctcaatagagattccagaagagaggatcttcgagttgtttggtcgtagaagccttgatggcatcgtcatgataaatgttgatggcgatagcatgatgcccacgctttgcccaaaggacctgcttttcatagacagcaaggttgaacaattcagcggcgacggcgtttatgtgttcaattttgaagacagtacgttcgttaaacgtttgcagaaggtaaaagggcgccgactggcagttctttcagacaatgaacattacccgcccttcttcatagaggagcatgaaatgaatgaactatacatattcggcaagctaatcagatgcttacctctaaaaatgatagagtttggctaataattaattcatcaagaaaccggcgaaagccggttttttttacgcctccaattcctcacctcataacactacactactaaaaatttcattttctactttttgttgttgcaattatctacttaaagtagctatagtcattgcatcgaaagcgaacaggcaggacgcccacgaagtagccgccggtggcatatgaataaccggatgattcgctgacagaaaacttaggttgggggtagaggtttacatgaatcatttattcacatgctcattttgcggagcaaccgaactgggagcgataaagatcgtcgcaaaaggtggtaaggacgaacctgccatctgttcggaatgcgtagtcacatgtgtagaaaaaatgatcctgactaaaaaatcagaggctgaaaaaccaacctctgataacgaaataatatcagtcgataaaaaactatttaaagagcttcttcagcttgtcctcaaccttcctgatttcggaagtaagctggctgctgttgacattgatagtagctccacatcgacaagtgaaacttttgttcgacttgagccaagcgattttcttcttcgtcttagtgccgcacttagggcatgcgggtaacgtaatttcctggttatcaaaagcgcccataaacatccctcttggttgtgtgagaacaccaagataccaccgcgcctgatgtggttaaaagcaggctaaagcaataacaagtaactccctgttctggcggcccggtgttttcccgtgtatttccggtaaccgccagcctttttcagggcacaacagaaaagggcatcaccgggcgacgggctcataacccaatccacccgggcaaaaagaaagcggtctctgcaagccgccgaccaatgcaggtgcccttctctgttgtgtatggagaaactaactttttagcgtctgtgcagatgcgctgaggaaccgagaatgaataatccgtttttcaaaaatatgttggtgtatcgcattagtcgcgatttcaccatcaaccaggaagagctggaacagcagcttgaactatttcgcttcactccatgcggtagccaggatatggcaaaaaccggttgggtatcaccacttggtcagctgtcagatcgcttgcatcacactgtcaataatcaagtgttgttggttattcgccgggaagaaaaaatactgccatctcctgtcattactgaagaactgcgcaagcgtgtgtcgcgtctagaatccgatcaggggcgtcgcctcaaaaaaactgagaaagattcgctgcgtgatgaagtgttgcactccctgcttcctcgggcgttctccaaaaactcgactgttggtttgtggatcaacgtcaccgacggtctgatcatggttgatgcagccagcgctaaacgtgccgaagactcactggccctgcttcgtaaaactctcggttctctcccggtggtaccgctgactatggaaacgccgatcgaactaactatgaccgactgggttcgttccggtagtgcgcctgctggctttggcctgggtgatgaagccgaactgaaagctattcttgaagatggcggtattggacgctttaaaaaacagactctggtcagtgacgaaattcatgtgcatctggaagctggcaaagtagttacaaagctgtctatcgactggcaacagcgcattcagttcgttctttgcgatgacggcagcatcaaacgccttaagttctctaatgagattacagaacaaaacgacgatatcgaccgtgaggatgcggctcagcggttcgacgctgactttgttctgatgaccggcgagcttatctctctcattaacggattaacaacctctctcggcggcgaagccaagcgataaacaccaggcaacaattacccccataagcatgggttgggttgctgcacgctaaattcagcaattcattaatttaatggcgcggtgcagcgcgccaatatggagaaaaccatgagctacattcagacattatccggcaaacattttaattacctcgatatccaacaggacgatatcgtgatcgaggatattgctaccgcgttgtctcatatctgccgctttgcagggcatcttcctgagttttacagtgtcggccagcatagcgttttaaccagccacctcgttccgcaggagtttgcattagaagcactgcttcatgatgctgctgaagcctacctgcaggacatcccctccccacttaagcgcctgcttccggattaccaggcaatcgaagctcgtgtggacgcagccattcggcagaagttcggtctaccaactgagcaacacccaaccgtgaaatatgccgacctggtgatgctcgccagcgaacgccgcgattttgagattgacgaaggttccatttggccatgcctcgagggagttgtcccaacggatttattcattatcaacccagttcgtcctggccagtcatacggcatgttcatcaatcgctttaacgagttgatggagcagcgccaatgcgccgcatgaaggtaaaagaactcgtagcggaggcgtttgcctccgttgctgaattgccaccaaagcatgcgccgcttatgcgcgaagtcgccaccagactggacgctacgttcgcagcattaaaagagtctctggtgcaactggaacaggaacgtaaagataaaacgccatgaccgtatttgaatatctccaggctcatccgaataccaccagcggtgaaatcgccaaaggtatgaacaaaaagaccccagcggtcgccggagcattatctcagctctatggcaccggtcggatcgtgaagtctggtgttcgcaagggtattccaacataccgcattaacgatatgccgtttggttgcagtaacagcctaaccatgatgtttaaccagctcttgagcagagccagacaaggagcagcccaatgacagcactcaacaaacaggcgctgcgtgaagaattccagttcatgcaggacaactatagcgacccggcagaccacgatcggcaggtgatttacatcgaggcggaggcgctgctggatgagttggaagccaaagactcaacgatagcagcacaacaacatgagatccgtatgttgctgaatgcgcttgaggaaaaaccatgcccgaaatgcaacgacacaggaatgactgatagtggcggcacgcagccatggggcgagccgattgagattgaatgcgactgccgacagcaggatgccaacaccgcagaacttgtagccgctggcattggcgtgaagggggagtgagatggataaattaatcaaacctaccgccaaaggtaaatatgacggttcatgtgattatctttgctcggaagatgcgcgattcatcgttatgcgcggcgattatacggaagcggaaataattcaggcttctgtgtctcaagatgtaatcgactcggatggtgcggctgattttgcaagtagcgcccgctattatcagtgctggtacaaagttagcccaataggtggtcaggatggctattcaggctggcatcatcctcgtgattcgccgtgtcgcggtgcatatttcgcatcagttttgcaatgggattaaggaggactaacccatgacaactaacaaccacccggcgcacggtcctgtatcactcgatcgcctgcaccagatacgcgaacacctgctgcatgatacccaatactcaaacggcgggaacagagcctacattctcgctgatgtattgaaggtgattgatggggctattgcccgcgagctggtacgccgtgagcatgcagcgtggtcacaggctactttcggcgatgtcggtccagttggtccgctgaagcacctttccaaagaagcgctcgaggctgctgctgaaccaggcgaccttagcgaatgggctgacatgcaattcctgttatgggatgcgcaacgtcgtgccggtatcagtgatgagcagattacccaggcaatgataaaaaagctggctataaataaggttcgccaatggcctgagccgaaagacggggaacctcgattgcatatcaaagaacagtcagagcaggagaaaaaataagaatgtttagcctgattcggcgcggtcaaatctacacggacagtagcaactggcccgtaattatccatagctgtagtgatcactcggtccgaattaaacgcaatgatggcgagctgagaacgattagcatcaaacgctttaacgaagattttgaacgagtggagcatgatgagtatcgcaaaatatgtgccgaaatagagcaggaaacaaacctgaaaaacctacgtgcgatgcgtcgcggcaagattactgaatagccaaacaggagaatatttaacgtgaacaacttaatgatcgaccttgagtccatgggcaaaaaaccgaatgcccctattgtctccattggtgccgtattcttcgatccgcaaagcggtgaactgggtcaggagttttacaccgctgttaatcttgaaagcgctatggagcagggagcggtgccggatggtgacactattctgtggtggttaagacaaagctcagaagcacgatcagcaatctgtgttgatgatgcgatgccgatatcatctgccctatctgaactgagccatttcattaatcggcattctgataaccctaaatatttaaaagtttggggcaatggagctactttcgacaacgttatattgcgcggcgcatatgagcgtgccggccaggtttgcccgtggcaattttggaatgatcacgacgtcagaaccatcgtcacattaggcagatctgtaggtttcgatcctaagcgtgatatgccatttgatggggttgcacataacgcactggctgatgcccgccaccaggcgaaatatgtttcagcgatttggcagaaactaatcccaaccaccagcaacagctaaagttttccccgggtgcagccgggataatggagaaataactatgagcaatattttccagttagctcccaacgattgggtttgtgaaagcgttttgatcgcggttactgggctcaaacccggaaccatcctccgtgccagaaaagaatgctggatgattgggagggagtatatccacgtatcgcctgacggaaatcctaaaccttccagtgagtgcatgtataacagaaaggctgtagatgcctgggtcgcttcaatgaaaagcaagcaaccagggtgatttgatgccatgaaaaaggtaagctcgtatcgctcttgggcgtctggaggtaacaccaatggataaagtcacatatccaacaggcgtcgaaaaccacggtggcacattacgcatctggtttaattttaaaggtaagcgtgtcagggaaagtctcggtgtccctgacaccgctaagaacaggaagatagccggggaactgcggacatcagtatgttttgccatccgcacaggaacctttgattatgcaacccagtttcctgactcccctaacctcaaggcttttggtgtaagtaaaaaagacattacagtgaaagaacttgaagaaaaatggctggatctgaaacggatggaaatctgcgcgaacgcatttaatcgctatgaatctgtcgcaaggaatatggtgccgaggatcggaggtaatcgcctggtgtcagcagtaaccaaagaggaattgctgtatctgaggaaatatttgctaactggttatcagaatccgacgaaaaacaaagccccggcaaaagggcgaagcgttgttactgtgaactattacatgacgacaatggccggaatgtttcagtttgctgcggatcacggttacttagaggtgaacccattcgagggaattaagcctctgaaaaaagccagggcagaaccagatcctctgtctcgtgatgaatttattcgcctgatagatgcatgccggcatcagcagacgaaaaacctgtggtcattagcagtgtacacaggaatgcgtcacggggaactggtctccctggcctgggaagatatcgacctgaaggctggaacaattaccgtcagacgtaattatacgaaacttggtgagttcactctaccgaaaaccgaggcaagcacagatcgagtggtgcatcttatccagcccgcaatcagtatcctgaaaaatcaggctgaaatgacaaggctgggcaggcaatatcacattgaagtgcagttacgtgagtacggccgttcggtgaaccatgagtgtacattcgtctttaatccgcatgtggtcagacgcagtaagcaggtcggatttatctaccgggtcgattcagtaggcgactcatgggaagcggcacttaagcgtgcggggatcagacacagaaaggcgtaccagtcacgacacacctatgcgtgctggtcattatcagctggtgcaaaccctagttttattgccagtcagatggggcatgcgagcgcgcagatggtgttcaatgtttacggtgcatggatggctgacagcagcgcagagcagatcgcaatgctgaatcagaagctggcagattttgccccattgatgccccatagccacgagaacagtacgggaggattattaaaatcagtaagttaacccctaacgcccgtcatgttaactgtgtggagggtaacaccacgctttatgccctgccgaaacccgaggttgtcctgcgctggcgtgagcagaccacagatgacttccgcttctgttttaagtttccggcgaccatttcgcatcaggcagcattacggcattgcgatgatttagtgactgaatttttgacccgcatgtcaccgttggctccgcgcattggacaatactggctgcaactgcctgccacattcggcccacgggagctgcctgcgctttggcattttctcgattctcttcccggtgaatttaattatggggtggaagtccgccatccacagtttttcgccaaaggggaagaggaacaaacgcttaatcgcggtttacatcagcgcggcgttaatcgggtgattttagacagccgcccggttcatgcagcacgtccatacagtgaagctattcgcgacgctcaacgaaaaaaacctaaagttccggtacatgctgtactgacggcgaaaaatccactgatccgttttatcggtagtgatgatatgacgcaaaaccgggaattatttcaggtctggttacaaaaattagcgcagtggcatcagaccactacgccttatctttttttacatacgccagatattgcccaggccccggaactggtacataccctgtgggaagacttacgtaaaacgcttccagagatcggagcagttccggctattccacagcaatcttctcttttctgaatttgccacctatcatagacaggtgccatcggccattttaaagggagtttgtatggtaagcgcgctgtatgccgttttaagtgcgttgttattaatgaagttctcttttgatgtcgttcgcctgcgaatgcagtaccgcgttgcctatggcgacggcggttttagcgaactgcaaagcgctattcgcattcatggtaacgcggtggaatatattcctatcgcgattgtgttgatgctgtttatggaaatgaatggcgcagaaacctggatggtgcatatttgcggcatcgttttgcttgctggtcgtctgatgcattattacggttttcatcaccgtctgttccgctggcgacgttctggcatgagcgccacctggtgtgcgctgttgctgatggtgctggcgaatctttggtatatgccctgggagttggttttctccctgcgttagcgcacaatacgccactttctttttcccggatttttacgttatgtctcaccgcgacacgctattttctgcccctatcgccagactgggcgactggacctttgatgaacgggtagctgaagtcttcccggatatgatccagcgttccgttcccggctattccaatattatttccatgattggtatgttagccgagcgcttcgttcaacctggtacgcaggtttacgatctgggttgttctctgggcgcggcgacgctctcggtgcgtcgcaacattcatcatgataattgcaaaattattgccatcgacaactccccggcgatgattgaacgctgccgtcgtcatattgacgcctataaagcccctacgccagtagacgttattgaaggtgatattcgcgatatcgccattgaaaacgcatcgatggtggtgctgaattttaccctgcaattcctggaaccttccgagcgccaggcgttactggataaaatttatcaagggctgaacccgggcggtgcgctggtgctttcggaaaaattcagtttcgaagatgccaaagttggtgaactgctgttcaacatgcaccacgactttaaacgtgccaacggttacagcgaactggagatcagccagaaacgcagcatgctggaaaacgtgatgctgaccgattccgtggaaacccataaagcacgcctgcataaagccggttttgagcatagcgagctgtggttccagtgctttaactttggttcactggtggcattaaaagcagaggacgctgcatgatcgactttggtaacttttattctctgattgccaaaaatcatctttcacactggctcgaaacgctgcccgcgcagattgctaactggcagcgcgagcagcagcacgggctgtttaagcagtggtccaacgcggtggaatttctgcctgaaattaaaccgtatcgtctggatttattgcatagcgtaaccgccgaaagcgaagagccactgagcgccgggcaaattaagcgcattgaaacgctgatgcgcaacctgatgccgtggcgcaaagggccgttctcactgtatggcgtcaacatcgataccgaatggcgttccgactggaaatgggatcgcgttatgccccatctttctgatttaaccgggcgcaccattcttgatgtcggctgtggcagcggttatcacatgtggcgcatgattggcgcaggggcgcatctggcggtgggtatcgatcccacgcagctattcctctgccagtttgaagcagtgcgtaaactgctgggtaacgatcagcgcgcacatttgttaccgttaggtattgaacaacttccggcactgaaagcctttgataccgtcttttcgatgggcgtgctttatcatcgtcgttcaccgctggagcatctctggcagttaaaagaccaactggtgaatgaaggcgaactggtgctggaaacgctggttattgatggcgacgaaaacacggtgctggtgccgggcgatcgttacgctcaaatgcgtaatgtctatttcattccttccgcgctggcgctgaaaaactggctgaagaagtgtggttttgttgatattcgcattgcagatgtgagcgttaccaccacagaagagcagcgacgcaccgaatggatggtcaccgagtctctggccgattttctcgacccgcatgatccgggtaaaacggtggaaggttatcctgcgcctaaacgcgcggtgctgattgcgcgcaagccgtaaaggtctggtaatactgccggatgcggcgtgaacgccttatccggcctacaaagtcttgctaattcaatatattgcaggggctatgtaggcctgataagcatagcgcatcaggca

SEQ ID NO: 1286 - DNA, 972 bp, Escherichia coli
ttatttgatgggataaagatctttgcgcttatacggttggatttcgcccggtttgcgagttttcagcaattttaatatccaggtgtattgttctggtcgcggaccaacaaaaatctcgacttcttcattcatccgccgcgcaatcgtatgatcatccgcctctaacagatcatccatcggtgggcgcacctgaatcgtcagacgatgcgtcttgccatcataaatcggaaatagcggtacaacgcgcgcacggcacactttcatcaaacgaccaatcgcgggcaacgtcgctttataggtggcaaagaaatcaacaaattcgctgtgttctgggccatgatcctgatcgggtaaataatatccccagtaaccctgacgtaccgactggatgaatggtttaataccatcatttctcgcatgcagacgaccaccaaagcgacggcgcaccgtgttccagacataatcaaaaaccgggttgccctgattatggaacatcgctgccattttctgcccttgcgaggccatcagcatggcaggaatatcgacggcccaaccgtgcggcaccagaaaaatcactttctcgttattacgtcgtatctcttcgatgatctccagcccttgccagtcaacgcgcggctgaattttctccggcccgcgtattgccaactcagccatcattaccatcgcttgcggcgcggtggcaaacatctcatctacaatcgcttcgcgttcagcttcactacgttctggaaagcagagcgacagattgattaacgcacgacggcgtgagctttttcccagtcgtccggcaaaacgtcccagccgtgccagaatgggatcacggaactttggcggcgttaaagcgatacccgccatcgctgctacgcccagccatgctccccagtagcgcgggtggcgaaaggatttatcaaactcaggaatgtattcgctattattttttttcgtttccat

SEQ ID NO: 1287 - DNA, 1323 bp, Escherichia coli
ttaatcaaaccgtagctgcggcacaatctctttggcctgtgccaggaattcgcgacgatcggagccggtcagcccttcggtacgcggcagttttgccgtcagcgggtttacggcctgctggtttatccatacttcatagtgcagatgcggcccggttgaacgtccggtattaccggaaagcgcgatacggtcgccacgtttcaccttctgtcccggtttcaccaggatcttgcgcaagtgcatataacgcgtggtgtagctgcgaccatgacgaatagccacataataacctgctgcgccactacgtttggcaaccaccacttcaccgtcacccactgaaagcactggcgtaccttgtggcatggcaaaatcaacacctctgtgtggcgcaacgcgaccggtcaccggattagtacgacgcgggttaaagttagatgagatacggaactgtttcgccgtcgggaatcgcaagaatcctttcgccagaccagtaccgttacgatcgtagaatttgccatcttcagcgcggattgcgtaataatctttaccttctgaacgcaaacgtacgcccagcagctggctttgctcacgtttaccatcaagcatttctcgtgacattaacaccgcaaattcatcgccttttttcagtttgcggaaatccatttgccactgcatggctttaatcactgcgctcacttcggcgctggttaaaccggcgtttctggcgctggcaacaaagcttcccccgacggtacctttcagcagattgttgacccactctccttgctgcatttcgctggtcattttaaaaccgttagcggcagtacggtcataggttcgggtttcacgacgagacacttcccaggtgaggcgctgcagttcgccgtccgcggttaatgtccaggagagttgttgaccgattttcaggttacgcaattctttgtcggcagcagccagttgggtgatatcacccatatcaataccatactgattgagaatgctgcttagcgtatcgccagtggaaacaacatattcatgcacgcccgcttcaccggcgattttgtcatccagttcgtcctggggaatggcttcatcttcttgtgcagcttgatcaatcggctcactggcttcaggtaagagcgaacgaatttcgttctgttccagctcaatggttttgacaattggcgtggcatcgcggtgataaacatagggccgccagacagcgacggccagagtaagaacggtgagcgaccccaacataacgcggtgtggtcgcggtaaattattaaacgccagggcgacagagcgggctatctgttgcac

SEQ ID NO: 1288 - DNA, 933 bp, Escherichia coli
ttaatctcctttcaggcagctcgcatactggttggctaattgattcaggaattctgaatagcttgttttacccagtttgatattcgtccccaggggatccaacgttcccatacgaacggatgtccctcgtgcgacgctctcaacgaccgctggcctgaactgtggctcagcaaaaacgcaggttgctttttgctcaaccaactgtgttcttatttcatgtaaacgctgcgcgccaggttgaatctcagggttaacggtaaaatgaccaagcggtgtcagtccgaactgtttttcgaaatagccgtaagcatcgtgaaaaacgaaataacctttccccttgagcggcgcgagctcgttaccaacctgcttttcggttgaggctaattgtgcctcaaaatccttcaggttggcgtcaagtttggctcgactttgcggcataagttccactaattttccatggattgcaaccgctgtagcccgcgctatctctggggaaagccaaagatgcatgttgaaatcgccgtgatggtgatcttcgtcacttttttccgcgtggtcgtgatcatcatcatcgccgtgaatacttttcatcagcagcggtttcacattctctagctgcgcaatcgttacctgtttcgcttcaggtaatttacttaccggtttttgcatgaacgcttccatctccgggccaacccaaacgactaagtccgcgttctgtaagcgttttacatctgatggacgcagtgaataatcatgttctgaagccccgtcaggtagtaaaacctccgtttctgttaccccatcagcaatggcagaagcgatgaacccaacgggtttaagcgaagcgacaacggcagcatctgcggcctgtgttgcaccgccccagagagcggcggataatgctgcgaaaagaagcgtttttttatgtaacat

SEQ ID NO: 1289 - DNA, 756 bp, Escherichia coli
atgacaagtctggtttccctggaaaatgtctcggtttcttttggccaacgccgcgtcctctctgatgtgtcgctggaacttaaacctggaaaaattttgactttacttgggccaaacggcgcaggtaagtcgacactggtacgggtagtgctcgggctggtaacacccgatgaaggggttatcaagcgcaacggaaaactgcgcatcggctatgtaccgcagaagctgtatctcgacaccacgttgccactgaccgtaaaccgttttttacgcttacgccctggcacacataaagaagatattttgcctgcactgaaacgtgtccaggccgggcatctgattaacgcaccgatgcaaaagctctcgggtggcgaaacgcagcgtgtactgttagcgcgagcattgttaaatcgaccgcaattattagtgctggatgaacccactcagggcgtggatgtgaatggtcaggtggcgttatatgaccttattgaccaactgcgtcgcgaactggattgtggcgttttaatggtatctcacgatctgcatctggtaatggcaaaaaccgatgaagtgctttgcctgaatcaccacatttgttgttccggcacaccggaagttgtttccctgcatccggagtttatttctatgtttggtcctcgtggtgctgaacaactgggtatctatcgccatcatcataatcatcgtcacgatttacagggacgaattgttttgcgtcggggaaatgatcgctcatga

SEQ ID NO: 1290 - DNA, 786 bp, Escherichia coli
atgattgaattattatttcccggttggttagccgggatcatgctcgcctgtgccgcgggtccgctgggttcgtttgtagtctggcgtcgtatgtcttatttcggtgatacgctggctcatgcctcattacttggcgtcgcgtttggtttgttgctggacgtgaatccattctatgcggtgattgccgttacgctgctgctggcgggcggtctggtatggctggagaagcgtccacagctggcgatcgacacgttattagggattatggcgcacagtgccctgtcgctgggcctggtggtcgttagtctgatgtctaatattcgtgttgatttgatggcttacctgttcggtgatttactggcagtgacgccagaagatctcatctctattgcgattggcgtggtcatcgtggtggctattttgttctggcaatggcgcaatttgctgtcgatgacgattagcccggatctggcgtttgttgatggtgtgaaattacagcgcgtgaaattgttgttgatgctggtgacggcattgacgattggtgtagcgatgaaattcgtcggcgcgttgattattacttcactgctgattattcctgctgctactgcacgtcgctttgcccgcacgccggaacagatggctggtgtcgctgttttggtggggatggtggcagtgactggcggtttaaccttttccgcattttacgatacacctgcaggcccgtcggtggtgctatgcgcggcactgttatttattatcagtatgatgaaaaagcaggccagctaa

SEQ ID NO: 1291 - DNA, 1011 bp, Escherichia coli
ttacggcatttctggcggcgtgatgccgaagtggttccacgcccgcactgtcgccatacgcccgcgcggtgtacgctgcaaaaagccttgctgaatcaaataaggttccagtacatcctcaatggtttcacgttcttcgccaatggctgccgccaggttatccagacctaccggcccaccaaagaacttatcgattaccgccagcaacaatttgcggtccatataatcgaaaccttcagcatcgacattcaacatatccagcgcctgagcagcgatatctgccgagatggtgccatcgtgcttcacttcagcgaaatcacgcactcgacgcagcagacggttggcaatacgtggcgtaccgcgcgcacgacgagcaacttccagcgcgccgtcatcactcatctcaagccccataaagcgtgcgctgcgactgacgatatattgcagatccggcacctgataaaactccagacgttgcacaataccaaaacgatcgcgcaacggtgatgtcagcgaacctgcgcgcgtggttgcaccaatcagggtaaacggcggcaaatcaattttaatggagcgtgccgccggaccttcaccaatcatgatatccagttggtaatcttccattgccggatacaacacctcttccaccactggtgaaagacggtggatctcatcaataaacagtacatcgtgtggttcaaggttagtgagcattgctgccagatcgcccgccttttccagcaccggaccagaagtcgtgcgtaaattaacgcccatttcattggcgacaatattggcaagcgtagttttacccaaccccggaggaccaaaaatcaatagatgatcgagggcatcgccgcgcagtttcgctgctttgatgaaaatctccatctgcgaacgaacctgcggctgaccaacatactcttccagtaatttagggcgaatggcgcgatctgccacatcttccggcaaagtggtaccggcagaaatcagacggtctgcttcaatcat

SEQ ID NO: 1292 - DNA, 612 bp, Escherichia coli
tcataacgcggcgcgtagggcttcgcgaattaatgtttcactgctggcgtcagggcgagcgattttgctcaccatgcggcttgcttcttgtggtttatagcccagtgccaccagcgcagcaaccgcttcctgttcagcatcgtcggtcgccgggctggcaggagacgtgagtaccaggtcggcggctggcgtaaagagatcgccatgcaaacctttaaatcggtctttcatttcgacaatcaagcgttcggcggtttttttgccaatacccggcagtttcaccagtgcccccacttcttcacgctcaacggcattaacgaactgctgcgctgacattccggagaggatcgccagcgccaacttcgggccgacgccgttggttttgatcaactctttgaacaacgtgcgctcttgtttattgttaaaaccgtacagcagttgcgcgtcttcacgcaccacaaagtgggtgaaaacgatcgcttcctgacccgcttcagggagttcataaaaacaggtcatcggcatatgcacttcatagcctacgccgcccacttcaattaacaccagcgggggttgtttttcaatgatgatgcctctgagtctgcctatcac

SEQ ID NO: 1293 - DNA, 603 bp, Escherichia coli
gtgaatattaattatcctgctgaatatgaaattggtgatatcgtctttacatgtataagtgctgccttatttggtcaaatatcagctgcatcaaattgctggagtaatcacgtcgggatcattatcggtcataacggtgaagactttctggttgcagaaagccgtgttcccctctcaaccatcactacgctatcccgttttattaaacgctctgctaatcaacgctatgctataaagcgattagacgccggactaacagaacaacaaaatcaacgaattgttgaacaggttccttcccggctacgcaaaatttaccacaccggttttaaatacgaatcttcgcgccagttctgttcaaaatttgtttttgatatttataaagaggcgctatgtattccggtgggtgaaatagagacgtttggagaattgttaaatagcaatccaaatgcaaaactcactttctggaaattctggttcttaggttctattccgtgggagcgtaaaaccgtcacgccagccagtttgtggcatcatccgggtttggtgttgattcacgcggtgggagttgaaacgcctcagcctgaactgaccgaggcggtataa

SEQ ID NO: 1294 - DNA, 522 bp, Escherichia coli
ttaacgcagtcgccctctcgccaggttcagtcgcgattcgctcatttgcatcgcattctgactaacgtggcagtgggtgatggcaatcgccagcgcatcggcggcatccgcctgtggattagcgggcagtttcagcaaggtgcggaccatatgctgcacctggcttttttcggcactaccaatacctaccactgtttgctttacctgacgtgccgcatattcaaataccggcaattcctgattcaccgccgccacaatcgccacgccgcgcgcctgccccagtttcagggctgagtcagcgttcttcgccataaagacctgttcaatggcgaaataatcaggctggaattgggtgatgatttccgtcacgcccgcatagatgagcttcagacgagacggtaaatcatccactttggtgcgtatgcatccgctacccaggtaggacagttgcctgcctacctggcggatgacgccatagccggtcacgcgcgaacccgggtcaatgccgagaataatagccat

SEQ ID NO: 1295 - DNA, 741 bp, Escherichia coli
tcagagagtcgctgcaacctcatcagagatttcaccgttatggtaaacttcctgcacgtcgtcgcaatcttccagcatatcgatcagacgcatcagtttcggtgcggtttctgcatccatatcagctttggtggacgggatcatggaaacttccgcgctgtctgctttcagacctgccgcttccagagcgtcgcgtactttgcccatttcttcccatgcagtgtagacatcaatcgcgccgtcatcataggtcacaacgtcttcagcaccggcttccagggctgcttccatgatggtgtcttcatcgcctttctcgaaggagatcacgccttttttgctgaacaaataagctacggaaccatcagtaccgaggttaccgccacatttgctgaatgcatgacgcacttcagcaacggtacggttgcggttgtcagacagacattcaatcatgattgccgtgccgccaggaccgtaaccttcgtagatgatggtttccatgtttgcatcatcatcaccgcccacacctcgtgcaattgcgcggttcagagtgtcacgggtcatgttgttagacagtgctttatcaattgctgcacgcaaacgcgggttagcgtccggatcaccaccgcccagcttagccgcggttaccagctcacgaatgattttagtgaagattttaccgcgcttagcatcctgcgcagctttacgatgtctggtgttggcccatttactatgacctgccat

SEQ ID NO: 1296 - DNA, 444 bp, Escherichia coli
tcaggcagcgttaattacaaactgttcaatcgcctgccggttgctccaggacttagtgagcgccgccgcagcagacgcatcaagccacttgtaagccagatgttcagtgaaaacgatctggcgctcgtgcggaagcgcaagacagaaccatgattccgtattacgcgtcacgcccggcgcatagcgatgacgtaaatgtgaaaaaatttcaaactctaccgtgcgctgacagtcaattaaggtcagttgttcagcgacaacatcaatggtgacctcttcctttacttcgcgcatggcagcttgcggcgcggtttcaccctcttccacgctgccggttaccgactgccagaaatcgggatcgtcacgccgctgcaacatcagcacccgtttcgtatcttgtgcgtagatgaccactaagatcgaaacgggacgcttataagccat

SEQ ID NO: 1297 - DNA, 1773 bp, Escherichia coli
tcagttattctcagccttcttcacaacctgaatgctcagctcagccagtgcagtcgggttagcaaagctcggcgcttcagtcatcaaacacgctgccgccgtggttttcgggaaggcgataacgtcacggatattgtcggtgccggtcagcagcatcgtcagacggtcaagaccgaatgccaaacctgcgtgcggcggagtaccgtatttcagggcgtcgagcaggaagccgaatttctcgcgctgttcctcttcgttgatacccagaataccaaacaccgtctgctgcatatcaccattatggatacgcacagaaccaccgcccacttcgtaaccattgatgaccatatcgtaagcgttagccaccgcattttccggtgcagctttcagttctgctgccgtcatgtctttcggtgaggtgaacggatggtgcattgctgtcaggccgccttcaccgtcgtcttcaaacatcgggaagtcgataacccacagcggtgcccatttgctttcgtcggtcagaccaaggtctttacccactttcaggcgcagtgcgcccatcgcgtcggcaacaattttcttgttgtcggcaccgaagaaaatcatatcgccatcttgcgcgccagtacgctccaggatggcttcgatgatttctgcattaaggaacttcgctaccgggctattgataccttccagacctttcgcgcgttcgttaactttgatgtaagccagacctttcgcgccgtagattttaacgaagttaccgtattcgtcgatctgcttacgggtcaacgatgcgccgcccggaacacgcagagcggcaacacggcctttcggatcgttcgccggacctgcaaatactgcaaactcaacagatttcagcagatcggcaacgtcggtcagttccatcgggttacgcagatccggtttatcagaaccataacggcgttctgcttctgcaaaggtcattaccgggaaatcgcccagatccacgcccttcacttccagccacagatgacgcaccagcgcttccatcacttcacgcacttgcggcgcggtcatgaaagaagtttccacatcgatctgagtaaattcaggctgacggtcagcacgcaggtcttcgtcacggaagcatttaacgatctgatagtagcggtcaaagccggacatcatcagtagctgtttgaacaactgcggggattgcggcagcgcgtagaatttacctttgtgcacacgagaaggcaccaggtagtcacgcgcgccttcaggcgtggctttggtcagcatcggagtttcgatgtcgaggaagccgtggtcatccataaaacggcgcaccaggctggtgattttagcgcgggttttcaggcgctgagccatttccgggcgacgcaggtcgaggtagcggtatttcagacgcgcttcttcggtgttgacgtggttagagtcaagcggcagaacatctgcacggttgatgatagtcagcgaggacgccagtacttcgatttcgccagtcgccatatcgcggttaatatttttttcgtcacgcgcacgtacggtgcccgtgacctgaatgcagaactcattacgcagttcagaggccagctttaacgcgtccgcacgatccggatcgaaaaatacctgcacgataccttcgcggtcgcgcatatcgatgaagatcaggctaccaagatcacgacgacggttgacccaaccacacagagtcacctgctgccccacgtgggacaaacggagctgtccacaatattctgtacgcat

SEQ ID NO: 1298 - DNA, 567 bp, Escherichia coli
atgcttgaacttaatgctaaaaccaccgcgctggtggtgattgatttacaagaaggcatcttgccttttgccggaggtccacatactgccgatgaggtggttaatcgcgccgggaagctggcggcgaaatttcgcgccagcggtcagcccgtgtttctggtgcgcgttggctggtctgccgattacgccgaagcattaaaacagccggttgatgccccctcccccgcaaaagtgttgcccgaaaactggtggcaacatcctgctgcattaggtgcaaccgacagcgatatcgaaatcatcaaacgtcaatggggtgcgttttacggtacggatctggagttgcaattacgccgccggggtatcgatacaatagtgttatgtgggatctcgaccaatatcggtgttgaatccaccgcccgcaatgcctgggaactcggttttaatctggtgattgccgaagatgcctgtagcgccgctagcgccgagcagcacaataacagcattaatcatatctacccgcgcatcgcccgtgtgcgtagcgttgaagagatcctcaacgcgttatga

SEQ ID NO: 1299 - DNA, 390 bp, Escherichia coli
tcacatcaccgggcagtcatcaaactccgcattcctggcatcattaatgatgtacgtgatcactccaaatatagcgggtgcagaactgtaaccatcatcatctgctggcagcgcttcccttctcccgttatccagattaaccaggtgcggctgaggatgagtccgatatcgcttgatcctgaattccccgtcgattgcacatatcagcagtgaaccatcgcaggcagtaagtgacgcatccacaacaagcaacgctccctggattatcccttccctgaaatgtgaacgcgatgcccgcatgaaataagtcgctgcgggctgactgattagctgctgatcgagggagattcgtgtttcaacataatctgccgcaggtgaaggaaatcccat

SEQ ID NO: 1300 - DNA, 243 bp, Escherichia coli
atgttcgtggaactcgtttatgacaaaaggaattttgatggtctgcccggtgcaaaagatatcattctgggcgagttaactaagagagttcaccggatcttccccgatgctgatgttcgggttaaaccgatgatgacactgccggcgatcaacactgacgccagcaagcatgagaaggaacagataagccgtactgttcaggaaatgtttgaagaggctgaattctggttagtgagtgagtaa

SEQ ID NO: 1301 - DNA, 381 bp, Escherichia coli
atgctgtggaggatattcattttcgtaaacgttggtttgggagaagcggcaaaacggaatgtgggaacaggggaaaatcagataccagatatgtctgcatttccatctggcaataactggtttcagttaccaagtggacatatcgttcagatattttccatgaacgttcttggtgcagatgctaatggcacgtcagctaattaccccattgcttttccaacaacgatgattgctgtcagtgctctatggtctgatgggactgtagcaaatgcaccgacatacaagatgatggggaacacgactaacagaacaactttgacgataaaagtatcagccagctcaggtacttacgggacaatgattattgcggtgggacgataa

SEQ ID NO: 1302 - DNA, 444 bp, Escherichia coli
atgaataaatacagttactctccttcagaaaatgccttttatgctgttgcgttaaaaaatacctatgaattgagtggcacatggccagctgatgcattagatattcctgatgacatttctgtaaaatatatggcggaaccgccacaagggaaaatccgagttgcaggggaaaatggttttcccacatgggctgaaatacctccaccatcacatgaggaacttattgaacaggccgaatcagagaggcaattattgattaaccaggccaacgaatacatgaacagtaaacaatggcccggtaaagccgctattggtcgtctgaaaggcgaggaactggcacaatataattcgtggctggattatctggacgcactggaactggtcgatacttccggtacgcccgatattgaatggcctacgcctccggcagttcaggccagatga

SEQ ID NO: 1303 - DNA, 594 bp, Escherichia coli
ctacgcctccggcagttcaggccagatgacatccggcgcggtgctggtatctgttgcagtcaccgcgtcaatgtaatccagcacggcgttaagtcgggttgtttctgcctgagtcagtttccgtccggcctgtaatttcagctgaatcagactaatggaagccattgctgcatcaatcagtgattggcgctgtgcttctgccgcttctactgaggcaccgtgttgtgcctcagtatctgtcacccatttctcaccatcccatttatcatatggcgttaacggtgaaagcgtgacataaccgtttttgatggcaccgatataatccactgtaacagctgcgccattttcgattgagtaaacagtctcattgcgatggtcttcctcatggctccatcccttacctgtaaatactgccactcttcccggaatgttttcgtccgggtcaataccagtggaacaggcgggcatacttacgccagtattaatatattcatcagaccagcccgtatattcagacgttactgcatcataataaaaacaacgcatatcacccggcactgcagccagcccattttcatcaaaaacaggtttcat

SEQ ID NO: 1304 - DNA, 933 bp, Escherichia coli
ttatttagccctcaccagaaagttaaatgcaatatttcgcggtctgacagcaacaaaattcacaccatcacccacagagttactgttgaaattaaatcgtgaaaatcctggctgatttccggcgatgccatcatgaaagttaattgcgtgtccagcacctccgcctatattcccggcaaactgagaaaagtttgtagcttcctgccagcttaataattcgcgaccaccatctgcacctcgcccgtcatcccagacacgaatgaaatcaccgcgggcttcaggtaataccagcgaaggaaacactttcgccagcacaggataatcagtggcagagaatttcgcgccgttgaacttcaaaaacaccatactggaccagctgtcgattacagtatttggcattgcagcggacggccagaagaacggaacgccaatagctggagaaccttctcccaaaccaaggtttgtgcgagcgtctgcggcattcgttgcgccggttccgccgtctgcgacagtaaccgcaccgttgctccctttctgcgcaagtttaccgatgcctgggatggttacggcggtgccgttgatggtaactgtgatgctttggtttgctgaggtggtggcgaacgtctcccacgcgccaatattctcgtcgtactctttgatgagctgtgacatggcctgcgccaggccgtcgactgagatattgtccgacacaaggattccatacttctggccgctcagcgccggggaaactgctggcgtaaccgtcattgacgtggcgctgttcacggatgaaatctgaaacagctgcaccgggttagacatcacgataatcgtctggccagcgcggacctggctggcgggagctgtccagtttgtgccggagccggttgcggtatttccgttaatagagatagttccggtgctataaatcat

SEQ ID NO: 1305 - DNA, 3927 bp, Escherichia coli
ttaacctgtgaatgaaccagatccgtgtgatactatgatagtaggcgaagaaattgacgcacccctgttattttgagcggacactttaatacgcactgttacgtttggacctgttacaaccgcagaatgcatgataagtctctccatgtcttgcacggatgaaccactctcattgccgttaatgtcgattgttcctgcaccattacctttaacgtttgctataacacagacgtgtcttgcgtgcccagaactggatgaatcattataagtcattaccttttctaaatatccgtcactagaccgactcacattcgtccctgtgtgcatatttgcaatgtccccgataaaactttgggcttccacagtccctttgaatttaccgcttgttgcttggatctcaccagtaaagctaccgccactagcatatactacacctctgacggtcacattgttgaattcagcatctccagctttattcaacttccaaccagcagaaccagctgcatagttgttggactggatatagttaccgatttttgcgttctcaatggtgccgtcctggatgaagctggcccggatgaatgtctgcccgttctggatcacgaacggcaaagctacgctatttccggctgccgtggtgacggcgaagcggtcagccaggaagataacctgcgactgcatgccggatggcgtattctccacgccgatacccatccccgcggcgtaatactgcccgttgctggagacaccaaccttgatgttgtacatcgcgctgagttcgccattaacgttggctatagcctgagcgttagtggtgatggcggaggtatgcccgttcacggtcgccgtgatgccgtttatctgcgtggcggtggcctgctgatagtcggagagcgtctgattcaggctgttgatggatgccttgttgccgttgacgtccgtctgcaggctcagcaatgaacgtgctgtggcttccttctcactgacgatcacctcgtcgagacggtccagattcgcgctgttgccggcgaccgatgcagaaagggttttacgcgtggccacctgagcgaggttggcctggattatcgcaattgcagagttcttcaccccgcccgtcatgccgtccatagaaacgctgatgttgtcgattcgctggcccagggcggtatcagccgtcgcaacggtctgctcaagctgactgagtgaagacgaaacattcccgaccgtgctggaaagctcattaacgctggtctgaaccttcccgacgtcctgggcatttttggcgatatctttcgcttgctgctccagttcgtcgttggcctgtttgatatcgttagccatgccagcaattttttcgttgctgtccaccgcgttctcgatcaggtctttgaacgtttccgactctttcatatcctccagaatgtcattagttatttcgctgacatctatcgaggacgtgcccatgatccagtcggtccagtccccggcgttaccgatacggtcaatcaggcgcgcgcggtaccactggcgaacgccggcaggcatggggccatgctgataatctgcagccgggtacggcaccaggaccagcagttcaggattggcgtagtcggcagttgtggcgcgctgaatctctgtataggccgtgtcgcctgagccatccggaaatttccaggtcaggtcgatatgccagaccacatcttcggtcgccaggaagttgagcggagtacccggttttcccgttttaccggagagataagttgtttcaccgtatccccatggtgacgacgtatcctgcgcattcagcgcccgtacgcgcacgtcatagctgcccgaataaatgccctgaaccgagaaaccctgcgcgctggtaaccggaacgtttatccagtccccgttgtccttacgccactgggcaacataccggattgcgccctctaccttatcccatgacacgtccaggcttgctacagtcagcccctgagacacatgatcgctctcagtcaccacgatattcttcggagcagacaggacgcttatcggcgtgacggtgatcgggggagactcgacccgaacgccgtcatcgatgtaacgatatttgtttggatcgtgctgaacggccgtaatagtgaaaccgcctgtactgtcgtcgttagccgcgattgaggtgaccctgaagtactgtattgcgaggttatcactgtctatcgcccaaacagcgcccgccacaggaacctgactgaatgccgtagccaccgtcaccgtttttttatcggcgctcaccgcgctgattgtccgcgtctgggcttttccgtcgggaaggttaaccaccagccggtctttcgccgcgtagtctatttctcgatcgagggtaatttggcggccgttggccgcgcttatacggcccccgttctccttaccagagcggaaaggatcggcgacaccgataatttcagcgggcaaagggatataaccgtccagccccacgccaaacgatacggtcccgtctttggcattggagagcaatacccagcgaccgcgtcggtgcgcttcactttgcgaggtgcagccgattgcggtcagggacgtctgccggacgtcgtaacgttctacaagcgccgaatcgtaaaccccctcaacggtatcgctgtaatggttctgcggatcggaccaggacaccaggcaggagctgtagcgattcttgtatgagccgcccgcataagtaaacagcccatcgataacgtttgagacgttataaacccagtcaacatcgtcctgcgggacgtctgcctggacataaatctgatcgtttccccagaacgttattccacgaaataccgcggcgagatcgttaagtacctgccaggcgtcctcctggctctgaatgaaaacgttgcaggtgaaacgcggttcggtgccaccggccccgtcggaaaccatttcgtcacagtactgggcgattgaatacagcgcccacttatccaccatggacgcatccacgcgcgtgcccatgccgtaaatttcatccagaaccagatcgtaaaagatccaggcagggttattggaccatgccattttgaacccgccggaccatgaaccagaataggttcgggttttcggatcgtaattatccggaaccttaatcagcttgccttttatcttacaggtcactttcggcgcgctgccgttgaattggctgctgtccacttcgacatacaggagcgctgttaaaggataacgaagcttgctgtcgatgacttccgcatacgaaaacaccttgaaggcgttaaccagtttcgaatttgatccgctggcatcagccgtaatacgcctgaccctgacagaccagccggacgtggattttggcagatcgatacggtggtcacgctgatattccgtcgtggtctttccgtcaaacttgccgtttacaaccgttttccaggcgccgccgtccgttgataaatcgatcgcatactcggtgaccgtgcccaccatatcgccattatctttatagagatactggaccggaaggctgagcttgatacggatggcatccagggaaaggtttgtaaactggcgcgtccagggcgcggtggtggtgacagttgtgcccacggccagctcgttgtcgacctggggcatcccggcaatataggtctggtcctgtgtgcccttgcggaactcccatttcacgccgctgaagttgtattccccgctgtcgtttgccagcggcgtatcgttgagaaaaatgttctgagcggtcaggtcgccctgtatttccccctcagaaacggcaatgagcatttttaattttgcgaccgacagcagatcgtcaggctgctcaaccggagtatgtgaactgccacctccccctttggcaccctgcaggatggtttcttgtttaagaagctgcattttttcacccat

SEQ ID NO: 1306 - DNA, 618 bp, Escherichia coli
ctactgctgatcgctcgagtacataccggcgctgactatcgctccccctgcctcagtcagaccgtaggccagggggacaggatgccccatagcgacggtattgaccggcgccccgaaggcgtagttaggcgtgttgtccgtgctggaggatttacccgcgccgaaggatggctggggcgtgagcatctggacaacgccccccagcatcatcgacactccgacccctgtcagaattgacgtggcgctgatagctgttgcactcatcgccgcgccccaggctgccatgctcgcaccagcggtaaagaatgcagcgaccagcgcaacagccccgacaactatctgcaggacgcccgaacttttggccccctcataaacgggcacgatccggtacacgcttccaccgcgggtcatatcaaactcttccagcccgatattgttgccaccgttaaaaaaggcgaaacggatccccttcatatgagcttcagacatatattttttgaatccgggaacctgtgaacacatggccctgagcatctcgcgcaggtcggcaacatcaaactgaacgcgtttaccgaatttttttgccattttaccttcgagaataagcgtcttaaccat

SEQ ID NO: 1307 - DNA, 720 bp, Escherichia coli
ttaaccatgcattctgtccttatgcctgaccacccggaccgttctgtcgcgataatattttccataaggcgttcgcgaagaaaggtgcccgaaaagatgatggagaatgatgttatcacccacatataccgcggcgtgattagtcaccgatgcctgcacactcatcatgatgatatctccgggctgcattgcaccggcggcaatctcaacgaatccctcacgctcccagttgtcgtcgtagagacgctccttgccgctctcccaccattcgtaaggtactgaataattgccgagaacaatgccgtattcgcgcagataaaattcacggataagcgaccagcagtcggcgtaacccagcacccactgccgcccggcataatcccggtcttcacgcggggaaatcgtacaaaaatccccgtccggccaggacatgatcccccactcaatccccgaccagtcgcactggatccggtccagctctgagggcaccagccgaaccacatccggatgggaatgaatgagcatgatgatctcaccgcgcgcgcgggcagcgagctggtcttccggggagagcgtgaatgtctcctcgggtttatcggcaatgttgcggcagggaataaagatttgttgctggcctgactgaacaatcaggccgcaggcttctttggggtattcagcagcgacgtgctgacggatagcatccagcaatttttcacgcat

SEQ ID NO: 1308 - DNA, 738 bp, Escherichia coli
ttatttcccctgcaggtttgcagccggaaaaccgccgaacggcagcggcgcatccgggccgtgacgatcctgacaatcctgccggcggccgccacaaacatctttcgacgggtcatcggtcggtgtaccgtctttggtaaagtatttcgtgccgttgtaatcgcatccggtcccgcttcggtaccagccccgcatacaccaggtgcagacaggcgtaatctgccgtgtcggcagctgcaggctctgaatatcgaaaggagaacacagctcgaaatcaacctgtacccgcgtctctgcggttttagcattgacgtaaaagagctgtaagcgctcatcggccgggctggcacccggattaccgtttttccagttggcggcatcgagatacttcgaaagcgtggtatggattttgaccttagccctgaccatatcgtcatattcaagacacagcgcggtgacatagtttccgacgttcccgacggacagcgtgggcgttggctgggaacctgtactcgataactccatccccttaagttcgtagggatggggatcgtactggtttccctgccagataatggcgggcagattttctgcggcgaaggctgcccacccctcttcctgaatattgtgcgcatgaaaacgcagcacctgatccataccgaattcagtgccgtcgatctcaatcagctgaataacgctgccgggctcaagctgttgtatgtctgccgtaaaactcat

SEQ ID NO: 1309 - DNA, 339 bp, Escherichia coli
tcagggcgcgaacgcctgttcaaaagtgaaggccacagtggcttttttcccggtagggaaagaaacgctgaacgaatcggccttcattctgaacagctttttttcaccccatggagtggtccaccagaacgatttagtaacgtgagacatcaggaaagcgcgcagcgcagccgcctcctgtctggtgcccgtccagtccaggttccacgtttcctgtttgtcgttgatccccatccccgctatctgtttgtagccatccccgaactgggcctgcagcgttcgggctgtttcagtgccctgcgctgtttttcgcgtgcgccaggtaaacgtgtccgtcac

SEQ ID NO: 1310 - DNA, 3138 bp, Escherichia coli
tcactgtgtcctcctcgaataaagcacgccgcccgcggacatttcttttttcagtcgctcggtgattgtctgctgaacaatcgcctgcagctgtttcgccgtccccgtggcgttcgcctgatttatgcttccgtcactcccctgctggctgatgctgactggggcataaacactgatcccgcccatgccagcaccggctgcgttcccgccgccgaccagaccacccgaggcatacccgcgcatcaggcgatagagattagccacgccgatgcggctggttgattctttggtgaagacgaattccccgcggtgaacgataccggctggctcgtacttgccgccgtgcccggtaaaaccgcccacgtcaaaaccctgtggccggtatgacgggaccgcgaatgactgaccggcagaggaggttttcgccccgccgctaacccagcccattgcactctggatggtgtaagccaccagcagctggttgataacggacacaatcattttaaggatcgagctggtgaattccctgaagctcgccttcccggttgtcgtcaggctggtaagctggcccgccaacccgctgaacgtagcctgagaaatctgctgaacggagctgaaaacgtttgtcgctgaatcctgatattcggcccaaccctgtttcgcaccggccagccagtttgcacgcagggcatcttcagcttcgaacgtcgccctttgctcttccagaaccttttgctgcgcctgagggttgtacgaatagctttcgctgagacgctgcagcgtagtttgtcgcccggcttcccgggtggataacccctcagactgagcctgcaggcccgccctggcggctttttgctgctgctcaaacttcacggcctgatcggccagctggttgagcttttgctggctggcaaccttatcgcccaggtcggccagctgccgcttgtactcgagcgtttcttctttgtgcgccagcagggatttttcctgcgccgtaagctgacgacgcccagcggcctcctgcagaacggtgaactgattttcagtttgccagagatcctgacgctgtttacttatgacgtcgttcacgctggtatgctgctcaagcgttttaagctgggcctgaagggtgagaagttcggcctgcgccttttcctcggctttgtccccggcgggcgttgagtagcttttgcctttcggtgtttttggatccttccactgcttttcaatcccggcgcgggccgcggcaatgtccttttcagtccacagcgtggcgacaccgtctttcgcatcctggcggtttttctcaataagctgactgagctttttctctgctgaagcccgcttttctgccgccgtcgcgccggactccaccagctggttaaactgctgctggctgcggattgcctgagcctgctggtccgttcgcattttttcccgcgcggctgccagcccttcctgggcgtattgctgatcggcaagatcgtaagcctgctttttcagctccacctgctggcgcgcgtttctcagcctttccgcatccgctttctgcagaacgttgttaccggcataatccgggtcgaccttaagattgctggacagcgcgcggtactctttctctgctgcctgccactcagcaaaagagtcctggcgcttcatcgcggtgtcaggattacgcccgacgcccagcatcgcatcccacgcaccggaggcggcattcttcacccagttccaggctttttcgagggatccgagattatcctcgaccgcaccggcgcgctgaatgaccgcgtcggaatatgcccgcatggccagctcggcagccttctgagaatcccccagcgcctgagcagaagctatctgttcatactgggtggctgtcagaaaatgaagggaatcgttgagcgtcgcgaccgcgttaaccggatcatccttcaggcgtttaaactgatttatggtttcgtcaacggcctgcccggtagcctgctgcagcctggcggcaacattgctgaccatgctgacgtcattaccgctgaacgcgccgctgccaacgacctgcgccagcacgcctgcagcggcatgctgagtgatgccattacctgccagcgagcgcgccagcgcctgcagctgccctgacgttttccccgcgtagttcccggtcaggatcagctgcctgttaaattcctcagactctttgctgccgtcgtaccaggccttacccaacccgaataccgccgcggcaatccctccgaccatgctggcgatcccaagaccgcgcagtgacagaagctggtctatccaccctgcccggttagccagcgtgatcccggagccgcgcagcgcgccgaagttaccgcgcatgacctcgccgatcagtattcccagttcctgccgggcggcggcactttgcagccccagaccgtgcgtggcgactttggcagcttcgagcttgcggatatagacttcagccgcatcgctggcaccgacctgcgccgccttcatgcgcagtagctcggtaccggagagcttttgctctgcaacctgttgcttcagctggctgaggaatcgcgtgcgcgctgcggccgatttttcctccacgatctgcagttctttttgacgggccgtggtgcgggaaataagggcgagataatcctgctgggttatgttgccctgtgccctcgctgcgcgaaagcgcgcctgcacgttcgcaagcgactgtgtttcaccattgagctggcgtacgccgtcgatctggcggaaaaatgatgccgcaagttcatcctgtcgacgggcaagcgcagcggcctgcccgtcattctcacgcatgcgctgattaagctcggtcacgcggcggtgagtttcatcaacggactttgaaacgttctgccagtctttggtaagcccttccgttgcggccgactggcgggatttcatatctgcggcagccgccgcgccagcgtcacccacggttttaaacgcagccgcctgccgctctgaagcgcgctgcattcgcgtctggactttttcagagtcctcagccatcccggttagctggccctttatgcgggcaacctgctcactaaacgtggcgctgtcgacgtcaaggttgatgaccagatcgctaatctgctgggccat

SEQ ID NO: 1311 - DNA, 273 bp, Escherichia coli
ctaatctgctgggccatatcggatacctcctgttatcccctcagctgcggccatcagcgcatcatcatccggctcgtcatcgctgatgacgataccggaaggagaaagcaggctgaaatgtgcgggggtaagttccgggtcgcggaagaaaagagtggagatggaataaagcagctctgagaaatgcgcatcgagctgagcgtcctgaaaataatgctcccggtagaactggtgccagtcgcccagctcagtggaagtcattccagccagcat

SEQ ID NO: 1312 - DNA, 432 bp, Escherichia coli
tcagctcgctggcaagggcttttccgccgcaacgggttctgcgctttcggcctccgctggggcatccggatcggcagctttgtcatcctcaaccggaacgagcatgccggagagcagctttatttccatttctgctttaccgatcgcctccggcggccagccgctaagcacctgctggtaaagcgtctccacatccgtgccagccggatcgttatgccacaaagacatcgcaatcaaacgcgcaccgcagcgaatatttgagccaatcagcctggccgtcatttcctgatcgctgatgccgtcgctgtcagcgctgacggccttttcctctgcggccataaacgtgatgtactcaatacgctgaagcgccgacagctcgaagatggtcagtgattctttttgccaggtgaacttctcttttttcagaaacat

SEQ ID NO: 1313 - DNA, 744 bp, Escherichia coli
ttacgctgcagttacggtaactttgcagaccgcaacgaaattaccgtcgctggtcataacaataacgtcagcggtgcctgccgccacgccggtgacggtgatcgcattaccgctaacggtgaccgttgcttttgccccgtctgaggttgccacacggaacgaggtatctgaggcactggctgggttaaccgtcacattgagcgttgtggttgcgccgacggccacgcttgccgtggctttatcgagcgtaacgcctgtcacggggatattcggggtcccgctttcttctgccagttccggcttgccggtattggtaattttcgctgtacgggttatgacctcttttgccggaatggctttacccaggctgctgcaccagccgcggaaaacgtcgacggtaccgttcgggtatttgattttgtaatagcgtactgagccatcaataaaccatgcgacaaggtctttttgcccttcttcgcccggcttccaggcgagggtgaacgaggtatcgccagcagattttgccccctgggccgtcgcgttccagtcggcatcctcgtcgtcgaggtaagtgtcgtcatacgattcggcggtcatttcgcccggcgtcagctctttaattttcgccaggcggttccagtcgatatccgagagtgggttagcgaaagcgttgcccgttccggtgtaaagccagagggtggtaccggcacctttcacaggggccagcgggtttggagtaggcat

SEQ ID NO: 1314 - DNA, 402 bp, Escherichia coli
ttaaattgaataggtgattaagtacgtgaaatcgactgaaccccaggtggccatttcatcatcccgctgatagtcataaccctgcggggtgaacgtctcgaccagttcggtcagacctgggatgaaggccattgccggatacactttctcttccatccaggaatcaagcgcgctgtcggggctggaggctttaagaaatacctcgatgtgaacaaccgcctgccacgaatcttcgtcaagcgaatcgccggtgtactccgcgtcagaaaggtatacagccacggcagggagatcctgctcttcaagaaaaacagggcgcccgtcaaaccaggtgaccgtgtcggtgatctcggctttcagtttggccagaatggctgcacgaattgcgctgtgtctgttcat

SEQ ID NO: 1315 - DNA, 573 bp, Escherichia coli
tcatcgcttcaggtggatcctcagttggtttttcagggctgcggaaagttctttgggcatatcgctttcaataaggcgctttgaaatagcggtgaaggccacggtgagcggtgtctcaagaggaactttgaccacatcaatcggataacgggcctgacctacgcgccgcatgacctgccagcgcccgttcgcaagctgttggataaaagcgttacgaaaggtatagggcccgattttaaggacgctgcccgctccgtttctggccccttttttacgcgagagcctgacgcgcgccgtgccgagctttatcgcaggaagattaccgcggttgatttttatcgacgcgaccgggcgatcgtgacgggccttgcgcagacgggaacgctggcggaccagacgaaccggaagcccctttttccggttatcatcaactgttgcttctttcgctacagctttgctcccctggcttatcgttcttctggccaccctgttaagtgcttttgcggttgcctcaggaacgattaaccggctgaggctgttcaggttctgaatagccctttccagtcctttcac

SEQ ID NO: 1316 - DNA, 243 bp, Escherichia coli
tcattcgagatggatgcggggttttccgttgaacatgtcatagcgggtaacgatcaggttcttaccgtcgtagtcgacgctgtcgtttcggcgtggctggtaaagctcagagaaaaccaccagcgaagtacctgttcccgacaatggccccatttcctcgagttgctcggcgggaacaacgtcatagctgctgccattgatgatcgctgtctttcccatcttttttatagtggccgcgtccat

SEQ ID NO: 1317 - DNA, 327 bp, Escherichia coli
ttaggcattgatcttaacttcaacaacggtggtgtttgcccctgcatcttcccaggcgatgcccgcggcaacggcgtccgtttcttcgatcgtgattttgccgtccttcagatacacctgcgccccggcagtaaccgcatctgcggatacttttggcaggaggaaaacaccctcagtaaaaccgtccccggtatcgccagccgggatatcggtaattgccaccgcgataagttttccaacaacaaccgggtcgccgctgtgaacatcggttgcaccactgtttaccagagggatcgttttcccgtcctgcgcatagttcttagccat

SEQ ID NO: 1318 - DNA, 1947 bp, Escherichia coli
ttactgaccagaggatttggtcatgccgcgatagtccagcggcgccacgccagcatcaatacgcactttcgtggcgataccatcagtggtgaagccttcctgctgatcgatgtatggcgtgtcgacgccgttgagataagcgacctcaatggtgtcggtgcccttcgcggcagccagataccaggctttcgcatcagcttcatccagacgtggttcggcaatgacttctgcaaagttctggatagggttaacgatcccggcattgatgtctgcacctttaacactggccgacttgatggtctgatttgccagagtttccagggcgacgggcaccagcatgtaggccggacggatattcagggttcgctccccctccttctgcagacgcatcagcttgcgcgattcgtccaggctggccacagaaattgcacccgagctcaggttcttgtgatcggcatggaacagcgcctttccgtctgagagtttcgggtttttggtcagaatggcgtaaaccagatcgccaatcgttgctttcgccgcgcgccccatcttcatcggtacgtcggtaagctggttcagatcgtcgttgatgatcgcctggcgagttactgagaagatttcaccatacgtggcaagcgcgatggtttcgcctttgtcactggtagtgatgtacttgtactcagccccttcgcgaacctgtcgcagagaagggaacccacccataccgacacgatgcgccgttttgaagtccgacagctggccttttttggtccactgctcgaaggtttcctgcgcctcgtcccagccctgaatcagcgctttgttcgcaacatcaagcagaatgttgccaaagtcagaggtgctgtgggtcagcgccaggccaaccatctgcatcgggttgtagctggccacgccgatacctttttctgtcagggccatacgcgcatactcgcgcagcgtcataccgttataaacgttatcccgctcctgaccttcgaacccggcacgcgccatcagtgcctggcgaataccatccgcgacgaagttaccgttgcccgcatgaatatgcggctgagtggttttattggacggcgtggccgttttaccgagttctgccagcagcaaatctttcgccttatcgacggagcaatcagggtcggccacacactgattctgcagttccatgtgcttattaccgaacatggcaaagagatcgccgatagcgttaacacgggttttctgctcagccaacacctgcgcgcggatcgcattttcatccggtgccgggtctgtttttgcctgcggtgcctgaggctgggtaataaccgggtcacgctgggtagtgttgcgcggcggggtgatcatgttgcgaatgctttttggcattttttcaaattcctcaatacgttttgaatgaatacaggccatagcctgaagggatggtgtcacctggtcggcaaaacccagttcaaggcactcgctgccgttcatccaggtttcgtcctccagcattaccgcaatttcttcggtggattttccggttttctgtgcataagccgggataagaacggattcaaccttgtcgagaagatccgcatagtcgcgcatatcgctcgcgtcaccaccagcaaacccccagggcttatggatcatcatcatcgtgttttcaggcatgatgaccggattgcctaccatcgcaatcaccgaggccatggaggccgccagaccgtcgatatgtacggtaatcgccgcgccgtggtgcttcagcgcgttataaatagcaattccgtcgaagacatcaccaccgggcgagttgatataaaggttgatgtgggtgacgtccccaagtgcccggagatcattgacgaactgtttcgccgttacgccccagtacccgatttcgtcataaataaaaatgtcggcctcactgttattgctggcctgcat

SEQ ID NO: 1319 - DNA, 1500 bp, Escherichia coli
ttactttttgcgctggctttcggacggtggcgcgcccggttctttggcttcggcactggtgcctcctttatcattggcggggtcggtgtcaaacaccaggccctgttcacggttctcgtcaacctcagctttacggcgtgacttaacatcatccgggttgcgaccgctggcacgtatccagtcggattcagtagcagcaccgccgcggatctgcgttttccaggcattcgcttctttaacgggatcaatccacggcataacgggccccgaataaaccgcgttataaagcgagtccatatcaatgcctctcggcagcttgatttctccggcagcaatagccatcttgagccaggctcggtacatgggccgggtcactgaaccgatgaaccagtcctgaagaatcagatagccgtcggttgactcgacaagctcctgccgctgggcactgtacgttccgttgtagtttctggatgtgctggaaaagctgaggcgactgccggcggacacggcacgcagctgtccgttacgaaaagattcgaggttagggttcgggcgatcggatttaatcatcccgatttcttccccggcctgcagttcgtcatagagcataccgggctgaatcatcagctcgcggtcatcgctgcttgaatcagaatcgaagctctgtccgtcgccttttttgatatacatgccgagtgccgcagcaattctggcagcagtaagctccgagtcctcgtattctttcagcgcgctcagacgcatcagaacaccagacaaaagagacgttccgcgggtctggtgcaggcgtcgggtgaatttgagatgcagcatgttctctgcatctatctctttggtatcaaactgacgcccggatactggcaggcttttatagacctgatattttttcgggcgtccccagttatcgacaaaaacgccctgattgagctgggtggcagcatcgctgttcatcggcacaaagtccggctccagcgcttccagccagaacggcacgccagcaaccggctgaagaccatttccggtaccgcgaaccagctgagcaaatacctcaccgtcccggagccacgttcgcagcatcagccgctccagcattgggcgggtaaactgggttgtgacatctggccttacggaccattcgccccactttcggcggatatcagtggccagctttttagcgatcttcccgttactcagcatcggatgcggttcaactatgatgcccttcgcacccaccaccctttcttccagcttgtcgaaaacgccgatcaccagatcgtggttgttatccagccagcgcgcctgctgcctcagcgaaaccgcccccatctggctgagctgatcggctgaacgattttccttctgggctttgtgggtacgcgtttgctttaccgcctcatacgctttaataactgcgcgggcacgcaggcgtgaggctttccagcctggtgaaaacaggccaatcgcatcatctaaaaaactcat

SEQ ID NO: 1320 - DNA, 216 bp, Escherichia coli
tcatccaaacctcgccagcctgtagccgggtcgcccacggcgtttgttattgagcgttgccagtcgtcgctcccattcctgacggccttttctgatttccgacaggttttcgagcgtcatctgctgcccgttgaaagtgattgatttcccctccagaacagacagctcggctgcagcatagcggtcgatcatgttttgaatatctgctggattcac

SEQ ID NO: 1321 - DNA, 2103 bp, Escherichia coli
tcacacccaacctcctgacgaagaccacggattagcctgctcggttacgggcttctcacgttttggttttggtttagatttcggcgcaggcggcggggatggcatttcgccagcttccgtctgcgtgtcctcgatccacgtttcccgccgtgcccactcaggagctgacggccatttgattttttcgtaaccactaaggatggcgagcgcgtcggcataaacgagcaggtcaaatgcttcgtttgcgccccggccgggcttactccatttcccttcattcgagcgttcctcatacgtcagttcgtcatagaaccagctgcccagccaggcggggaaatgcacatagccagggccgggtgaatcacgccacagcgcattattcacccggtctttaagggcatcggtctggagaagataaagaggcacatcaccagtcgcctgtgcgcggcgcgttgatctgcccgtgttgtcgggaaacgttcgctggataagtttgctgcgcctgacgctgtcccctttgaagagatagatacgcttacccagcccctcacggcgacatctgcgccagaacttgtaggcattatccgtcacgccatcttcgccccctgagtccacggccatcgacatcagccgcatgccctttgatgggtcagctgcgagcggccacgttttatcaaagacgtcagtgagtaaaagatcccagtcctccggatagctcgccggatccacctgaatgctttcaccgttgccgtcgcagcgcagcgaatgccggatgttgtaacggtcaactatccagcgctcacccatacttccataacccgtaatctgcacaacaaagcgccggttgcgcccggcctgcacgtccacggtcgcagtgagaaactgcacgccgttcggtaccgaacgttttgggacgtcttcggcacgctgctcgagcaattcacttttacgctgctccatgctggctcgcggcaaatagggcctgccgaaatcggtgttgatcaccgtcttcagggtttcttcgctgcgcgtggattcatattcctgctcggcggtcagaaacttataaataagctgcgcccaggtctggtaagcagctgccggaccttccatccagaaggaggcaatacgggaacgacggccatcaccgctaaccaggcctttcctgtcgatggtttgcccgtcccggagccagacacatttcatgttaagcgcacgcttcatgtccggtgtgatcctgcctttacaggcagggcactgaagaaacgccgcttcgctggcaagcacaggatcgctgctgtcgcggtatccggtcatattgtccatttccggctggaaatattcgccgcaatgcgggcatggccagtaaagacgacggcggtcaccacggttatagagcgataaaattccggtggtcggaggggcttcatggggcgtggagcgccgccattttgtgtctctgatatccctcccgggcgagctctcaaccagcgtcatcccggaggacatgaatgtcgtggttcgtttcgatgccagtgaaaaagcatccccctccccgtcgatatcttccggaaagcggtcataatccgtcagcgccacacttttatagtccgaggacgacatgatattgacggatggccagcccagcttcagatagttaccggcgcggaatgtacggtcgtagacgttgttatcgttacgtcttgggcttagccgggttttaacttcagggctacagcgaaaagtacggtccaggcgttttttggaatgctcgcgcgctttttcctcagatacctgaattacaagcatatctgccggatcgcagacaatgttataaacgatccagccgtcaatcagcccgatggttttacccgttcgcgctgggcccacaaacacaaccgcatcgtattcacgcgatgccagacagttcatcggctcaatcacatagggtgccagatccggatcccacggaactgagtttcccgcccccattggcacgcgcatataagtactgaccgcatcggccaccggcatacgacgcggggctcgtaaaataccggaaacatcgcggcggatgtccctggcggatgcccgctttgccat

SEQ ID NO: 1322 - DNA, 489 bp, Escherichia coli
tcagtcctcctcaggctgctcctcctcttttccagcgtcctgcaccttctccgccatctggtcgcgcagatcatcgataacgctttgcacacgaactaccgcagcaggcgttaaagcacagtcgcgctcgagcacatccgggagggtttcaagtaccatgacgacggctttcgccatcaatgagaattctcgcgccacttcatctgcgggtattaactgccccgtatcctgttcgaacttcagcctctcgttctctgctttccagtgggacagcctgtcagaagggggcatatcgtcgatgttggccgaaacggtagggatcatcagttcggtcagaatgtcggtcaccagatagagctttaacttgctattgctgcctggagcaggttcaacatttttcagtctcgcggcaaccgtctgacggtgtacgccggttatccctgccagctggttgatattgagttttaaagtggcaatttcctggtccat

SEQ ID NO: 1323 - DNA, 729 bp, Escherichia coli
ctatcgacggcactgctgccagataacaccaccggggaaacattccatcatgatggccgtgcggacataggaagccagttcatccatcgctttcttgtctgctgccatttgctttgtgacatccagcgccgcacattcagcagcgtttttcagcgcgttttcgatcaacgtttcaatgttggtatcaacaccaggtttaactttgaacttatcggcactgacggttaccttgttctgcgctggctcatcacgctggataccaaggctgatgttgtagatattggtcaccggctgaggtgtttcgattgccgctgcgtggatagcaccatttgcgatagcggcgtccttgatgaatgacactccattgcgaataagttcgaaggagacggtgtcacgaatgcgctggtccagctcgtcgattgccttttgtgcagcagaggtatcaatctcaacgccaagcgtcatcgaagcgcaatattgctgctcaccaaaacgcgtattgaccaggtgttcaacggcaaatttctgcccttctgatgtcagaaaggtaaagtgattttctttctggtattcagttgctgtgtgtctggtttcagcaaaaccaagctcgcgcaattcggctgtgccagatttagaaggcagatcaccagacagcaacgcgccacggaaaaacagcgcataaagcacttcattagcagcgccagatagcgtaatgattttgttactcat

SEQ ID NO: 1324 - DNA, 231 bp, Escherichia coli
ctatttgtgggtaaagttcgtagtgcgctgatcgtgcaaaatgattttagttgggaacagttcgcaactctgtcccataaaaatcagcatattcccatctatcccatatccagcgcattgaccatcgggatactgaagggagattccatcatctcttagaaagatcaccatctcttttgtttcaatttgcatatagctacctggaggatttatgaatgcaaggattttcat

SEQ ID NO: 1325 - DNA, 597 bp, Escherichia coli
atggactattaccatgagattgattttccatctttattcgcgagagcagtggaaagcgatgacgatgtgggtactacattgcgcattcacctactttgtgagcgcatggtcgaagcatggatatgcgcatgctgtgactgccaagatctctttggaagagataaaaacaaacttttaatcgaatgtaatactaaaatatccatggcgggaaacctgggaatccccccggaacttatgaaatcacttaaaaccatcaactcaatgcgtaatgaccttgcacacaatccatcaatacaaagcattgctgattcaaggatccagagcctgaaggatactctgactgaatactttaaacagcatccaacggaacccagcatggaagaatcaaaactgggtatttttaacgccgagaatcaattaaccgaagaagtttccttagatagtgacagttcaaaaaacagacttaagttaatcttgctgttcagcaagttaatgcaggcgttaatgcaattagttgcagctaatcataatgggcgctgggataaccaatttagccaattcgtttaccatgtgaccatgaacgcaacaaagagataa

SEQ ID NO: 1326 - DNA, 198 bp, Escherichia coli
ctagtcgtcgagttgcaacacaccgtgatccagtgattctgaataggcgataagtccggtataaccggggataatctcaccattatcagcttcaaattcaggaattgtgccggtggtgatggtgtattgaggctggccatcttccttcgcgaaggctgccaggtcttcaatctgcttagctgtaagaactactgtcat

SEQ ID NO: 1327 - DNA, 480 bp, Escherichia coli
ctattggttattcgacagtcgcactgattcgtaaatccgctcacacgtcattcctgcccggtagctttcgtcagatcgtccagcataatatcgagctgcttctgcaaggcttccgagcatgtcggcaagcattgctgcgttggctccggctgttttgcttctgacggaagtggcgagatctgcggtgtgctttgcggcgtccatgtgggtagcgagttttgttgcttcggcgcgcagctgcttaacagtggtagccaggccagcagaagtaacggcagcgctcgctgcttgagcttgagcatctttaacggcctcatcccgggcgattgttcgcccttgttcaatcatacgagctgcggtctgtgcattcgcttcctgtgaagattccgcgctatcccggtcagcccactttattttccagctgcggttcgtccactcactgccagcgagaaacgaacctaccaacgcaacaatcacaat

SEQ ID NO: 1328 - DNA, 549 bp, Escherichia coli
tcactggtctatcccccagcacgtcagtgcgctttcctggtcccgccgttctacctgcccataacatccatccttctggcccttggtcaggcggcaatcgcggccaccgtctttaatccaccagcggatagcttcacaggctcctttcgtatcgccagcattaattcgcttatagaacgtagacgggaaacattttccggggccgatgttatatgggcagaaagaagcgatacccgctttctgtggttcggtcagtggtactttgatatttcggtcaacccacgccagcgccttgtcgcgttcaatggcgtttacctgggcgcatttctcagctgacagcttcatgccctgtactactggcttgccatcaaccattgttgcaccacggcaaatggtccagagtccgccgccgtcgcgatatgctgtcaagctgttaccctctttctcatccagaaactgatcgagaatcacgggtgcggaagccccggcaagaatcaaaccaacgaccgctgcgctcaatttattcttcagctttagagacatagccat

SEQ ID NO: 1329 - DNA, 279 bp, Escherichia coli
ttattcttcagctttagagacatagccattgcgccgatcctcccgttctttccagcggaaataccagttcactgcacaggtgattaccgtgcatgcgataccgacaataattgcccagtcgctcaggcttaaccctgcaattctgtcggccaacatccaggacacctcttttgctgttttagctgtttcggcatatgccttcgctgatacaccgcagccggcaagcgtggttcctgatccatatgaaagtctgctgtaaatggtgctcattctggtcat

SEQ ID NO: 1330 - DNA, 1053 bp, Escherichia coli
ttatgattttttcagtttttccacctcttcggtggtctgtataaacctgtctgcctccagttctacgccgatcgcccgacggccaagttctattgcagctttcacagttgaaccagagcccataaagaaatcggcaacgatatcccccggtctgctgctggcgctaatgatctgtttcagcatgtcggcaggtttttcgcatggatgtttgcctggataaaactgaacaggcttatgtgtccatacgtcggtataaggaacaagagcggaaacagagaagcagcgccgaaggattttgtattcctccagcaattctgaatacttgcggtttaatgactggtaggtagccaccagctggtggtgaggatgttcaagcttttgctgaatatgtttatcgatggcgatccgcgtgaacagttcctgcaattttcgatagtccacttcattcggtagttgccattggcttgcaccaaaccagtgtgacgccatgtttttctttccggttgcctcagctatttctttcgagctgacacccagtgattcacgggcattacggaagtaatcaatcagcggcgtcataatgtgctgctttagctctgtgcttttcctttcgtaaacatcctctttacctgtatacggtccaagatagtgctcagcaaacaaaatccgttccgtagatggaaagtacgcacgcaggctttctttattacatccattccagcggcccgatggttttgcccaaatgatgtgattcaaaacgttgaatcgggcgcgcatcataatctctatatctgaggccagtcggtgaccgcaaaacaggtagatgctgccagcaggtttaagaacgcgagcatactcagccaggcagctatcaagccagcgtaagtagtcctcgtcccccttccattggttgtcccagccgttgggcttcactttgaagtacggaggatccgtaactataagatcaatagagttatccgggagggtggcgacgtaatgcagactatcagcgttgattaactcaacactgtttatttttacagtatttttcat

SEQ ID NO: 1331 - DNA, 192 bp, Escherichia coli
ttactggaggcgtttataacatccgaactggtaatcagataaccccgccatcaccagctgcgtaagtatgagctggcaacgttcgtggctgaggtgggtattctgtgcaatctccccagccgttgctggtttatcgcttaattcattgaaaacagcctttgccgtttctgtcatatcttcctgatttagcat

SEQ ID NO: 1332 - DNA, 900 bp, Escherichia coli
ttagcaaatattccacatcatcgtactaccgttatggttttcgataatttttgcggctgggctagtaccaaaagagtgcatatagcaatgatgaatagtaaggaccagatcctgcaacgtttggtcactctctagctccatgatatttaaaccaatattttgagctttgtccaaatgaatatgtctggcatgtgcatacgttgcttggtggttgtttaactcatcacatatacgcttagccttagcttcagcgtcagcctgacctgcgaacataccagtacaaagccatttctggacaatttcgttcgcccagagaattgctttttcacactcgccaatcaacgttggatttagtttttggaacgtaaattgccaccattgcagtgcagcagggttggcaaaaatttccgcttttgctctctcatactcctcaataattgcatgagatgataacccattaaactgtggatcaattggccccaagttcgactgtttacctaaaacgatctgctcagcacaacaagcaagcattgtgccacaactcattgaaatcataggtacaatcgctcggatattggttccgaactttgaacgaagataatgaccaattgattctagagctgcgatatcgcctccaggagtatggagtaagatatccaatcccagactcgtatctaacccattgatagcagacataagaccatttttatcatcatctgacatctggatcagatgttgaaacccaggcccccctttttgaaggaagcctgagtaataagaaattacatttcggccagtatgtttcgataaatcacgtaagtacttgtggcgaacctcatccgctggtgtacgttgagcgatagtacccatctcacccaatacgtctatccaatttggcat

SEQ ID NO: 1333 - DNA, 207 bp, Escherichia coli
tcagtatgagtacagttggtgagattgctgaccgttctgctcagtagtatttggtgttactgtgctgtatgaatagagcacaccacttctcacattcagatcgttttgctgagcgagaacacgcatagcaaaatgctgtacggattcgcctttttgaaactcttggggttgtatgcccattttttcgtaaaattcagcagcgctcat

SEQ ID NO: 1334 - DNA, 690 bp, Escherichia coli
tcacatttctgccactttgagggcttcttcttcctcatagtattcaagagccatggccaacgcagattcatcaagctgggtaaaagcggcctttaacccagcccagtgccctgaatagacacgcaaccatgtcgaacggtcaacgctaaccatgcgggccaacgctgcaccagcatagtctttataggtttcattatttctggttgcggcaatttcctgccctgccagccataccaggcctatcagtttctttactacgcgctcctgaagggagttatcacccaggcatttctgataagttttccagacgtattcacacatcatcacctggtgcttatagctaaggtcaaaaccgtagcagtaccgcaaccaggcctgctggtatccactaagcgcggacactgccctacgccacggcgcggactcaaattccgcatcttttatcggcggcattggcctgcggcggctgcgtgtttccagcacatacagtggcgcggaaagtgagttaacaaagcgtggccccttctctccttcgagttcgacgagatgaattccacggcgaggggtggcatttttgtctgctggtgggtgttcactgaaagcctcaagctgcccttttgttcccccagacaggtcaggtagcgcgcggcgcaattctattcttacaaaattcaggtcttgttgattcat

SEQ ID NO: 1335 - DNA, 996 bp, Escherichia coli
ttaagctttcgcaattacgccgatcgccagcgcccgatccataaaacgcagtagcagctcaagctgcgtaccatgcttctgctcgaatgccggtacatcggcgtgtaactcgtcgtggcactctctgcacagagggatcacgaagagatcatgggcttttgttgctgtcccccccataccgtgccctacgatatggtgcggatcatctgctggccgtcggcaacactcacagggttgtgttttaacccagcgggtgtacgtctcatttatccagcggcgtcgctttggcctgagcatgaaagattctggagactccggatcaacagagagcgtgaggatcttcttcgccttctcctgcacgaggctggttgcagaagcggaaggcacaatgtcgctttccctcatgaccgagcggatcttatcatccggaaggcgtagccccttgtgcgcaacgctttccggaataacatcagccaggtcgtttctgaccatccaccagcacagttccggaagcgtcaggatatgcgactcgggaaaaccagaatcacgccgaatgacttccagaatccaggataccaggtttcctgccgctatacctgcaagctgttcggtatgctgccccgacaaagtgtgatcgcaatgccagcacaggcgaatacttcctggtgggtgccgcattgttgtgaagttcttgtcgtgccacgatgaatgtggccactggcattcaaaccgattactcaaccattgctcaagggaaggaagcccaccagcacgctgaataacccgatcattctcgaagacctgccgcattaccggatcatcagccagcggctgaatggcggcgggaacagctcctgtactgaatgacgccatttcttctggttcaggctcaagcagaacgcgaccgcgcataaagaggtgcatcagttccgcgccgggacgaaacaacacaatccccatacgatgggcgatctcgggggtaagcagagctctcac

SEQ ID NO: 1336 - DNA, 684 bp, Escherichia coli
tcacgcgacctgccccctggcaatgtgttctgcccacagtccaccaatccagcgcacgcctttcgccgtgaaacgtgcctggctgaatgcatgatttgaggttacggatgtgccggttttcacttcaaaacggcccgcatcaatatgctgatgccgtggggtcatcgttccgccaagacgatacatgatgtcgttctcaaggaggaataaccgcagatcgggctctttggccttaagcagttttgccacctggcggaatgacattgacccactggctgtacagtaccgatcaacaaacgctaccttcggcgccgcggcagccagttcgttagtcaactgctgtttttgttctgcaaggtcagctgcaagacgtagggcttcagagaatgattgaggaatcgtctgctgctgtgcctgctcaagctcctgccagcgatcaaccagacgcgcggtaaactccggcgacagctgcgcgacaacgatataactgtcccgcttccctatcagataaaccgataccgactgattgaggtgatttttaacttcccccattggggggagttcaataacaccgcgctctgccaggcgttcaatggaccgtttaacatggtcatgtcttgattccaccagctcagcaatatcgctgctggacatggttaacgctgttgttgctaactggctcat

SEQ ID NO: 1337 - DNA, 387 bp, Escherichia coli
tcaggcggctgcacccgccggttcatatctgctgattgttatctctacccgacctttcggcacaacgggtccccattccaccagcatgcgcttaatctggctgtcgtcttcccagacacccgcatgcgtcagcgcgtcaaacagggctttgttgtaattatcgatatcccggcggcgcgcatccggcgggtacagagtgatttctaccgctgccagttcagtcgatggcttcgggagacgtcgtaattgctcaatgatcgccacgcaggcagcgctctggtatttacggccagcggcgctaatgaggtgacgaccggccagcggccccttgttaggggcgcgccagtaagtgttcacgctcggaggaaaaggcaggatcagtttcac

SEQ ID NO: 1338 - DNA, 1320 bp, Escherichia coli
tcacgcggcctctccccgcatattgcgaacaagttcagaagcagcagtaatgatttcgctggtggcagtccgctccagccagagttgattgatattggctttcagcttgtgttgcagtgactcatccagcatgtcagcaccatccacctggtcgaatacaattctaacctccagcggccagatacgggactcgggaagcggatccgatactggtttagctttctcacgaatgtgcatgcggatctggcgaatattggaccaactggaaacatccaggcttcccatggctgcaatgaagtcagtgctgttcatgccatattcaccggatgcttcaagggcaacagtgcgaatacgttccgacatatccaggcgcacagcagcgtcatcgaattcaatcgacaacagccactcatccacaccgaacaaaatactctcacgaataagcagcttcgctttgtcgatcgttaaaggtgatacctgagtgaattccggtgcttcgacagaatccgccgcccaggtatgcccaaacttcgattcactgaatgtgtattcttctttatcgccaaacgcagctctaacgcatgcccacgcctcgacaccgctgatagcaaaaatatctttctgggtgagtggcaactctgcttctggcttatcagctgcaggaggtgtggcagttacaggttgagacttgctggcagcaaattgtgccaaagccataaacgcccgcccttttgcctccagttctgtgcggttgatatagctgaaccgctcgccacgccatgacttatcgaatacagctatggcaccggcaaaaaacgcgctggtgggtttctgtttttcgtcagcaggtacaaaccacacaggcagatcgaacccaatgcgcccgcgaatgaatacaatgtgatcggcatcttccggccaccacgtttcactcggcgcggcttttatcaggaatacatagcgaccgcccttctcgcgctgggctgctgcgtagttcatgatgtgcgtcatgccggtgatcgcctgcttctcgtggtactgcgaacggctatacggtgggttgccatagccagcgccacccagttcagccagacgttcagaccagtcctgcgtcagcgcgttatcttcggcggtgtaccatgccgggcatttcgcgttgtcgtcgtcagcaaacaaatccagaactaatggaccaaatagcgcgttgatcccccaaaaaagcagatccggtgtccgccactgatcgccaacctctttcaattcgtgagctggtttgctacgcagtgccgccagcgcctggcaatatttattggtcatcat

SEQ ID NO: 1339 - DNA, 882 bp, Escherichia coli
tcatgaacggaaccccgaattttctggcagtgagtaatcaacactctggaagtttgcgcggctggctgagttagtctcccatttgccgttaacgcgttcaggccggccagcactggaccatttggtcgcgctttgcaggtaaccagggaagttttttggaatgaacagagttgccgggcggaggtattgcgcctgctcgctatcacgccaatcggcatttttgtaatccactaccaagcacaggtcatcaacagtgaattgttcccgaagacgggcgcgaatattctccagcgacgtgctgcatacctggtagcgtgagccagtagtctgattcaggtaagacaaaacctgtctggcctgatcagtaatcacaacctcagggtcgggttgcgccgcaaccggacaagagggttttgaagttacttgtggttcttgttttgattttactgacggatccccaccagattctgacgggtcaaaaccgccttttttgctggatttcgacgcctcaaattttgacgggtcggattttgatgcatcagattttgatgggtcagattttgatgcgtcagattctgacaggtgagaaaaagcagcctctcgcaacttaacgacgttaagctgatatacgttcgatgcgttacggttcccattacggcgctgcttacgggaaagccagccatccttctcaagctgagcaagggccgtccttaccgtactttctccagcaccgatttgacgtgcgatcgtgccaatagacggccagctaacaccctcatcactactgaagtcggccagacgcgccatgatggcaacgctggataacttcatgcctgacgaagcgcatgcatcccatacgtaaccggttaatttagtgctcat

SEQ ID NO: 1340 - DNA, 339 bp, Escherichia coli
ttaattctgtaaatttacgctggaattgttcaagagggctgaagcactcatgatcgtacccttcgcgaaggtatataacgcgctgtgtatctggctcccagcggacaactctgacgggaactccgtagtgatctctgaaccgccggttaacttcagccattcctcgcgccccttctcgttcatctgaacaaatgcttctaccatcaagtctgctggctggtagttgcctccatcagccgcgttatttatgatttccacatagccgaactgggcatctttacccaccagcggcaaacatctgaattgcttagctggtctgaatcggtttacactgttcat

SEQ ID NO: 1341 - DNA, 564 bp, Escherichia coli
tcatgcgttagtttctccactgatacgacacgccaaggcgcccggagctgcacactcgcgggcgtcaccttttctgcctgttgaaacgaatacgtcaatcgcctgatctgaaacaccaaccccataaagcgccataaatcccaggaacccgtgaatctggtggcggagcttcttactgaataattctgaaagcattttgcgctctgatgaatcaattaccccatcagccgctgctgccatcttggcattagccagctcaccagatgctgctgccgctttcatctcaatgctgtacagctcaacgttatccaggctctcagcagttggaacatccaccagccatttcccttttcggttcgcctggtactcggccaagtaacaagaaccagacaggtcctccatccgttccagttctgccaaggtaaagaaccgactgccacacttctggtacaggtggttgtggaactggtcgatagtcatccctaaatcggaagccatacctaagcgaccatgcttgtgtgccttacacatcaggcggattgctgtatttatgctgtctaccat

SEQ ID NO: 1342 - DNA, 258 bp, Escherichia coli
ttaaagttgactattgttgttagcggaaggtatgccgtcatttttgttcggataaatatcaggtcgtaattgatggggagttactacccatccgccccattggcagagttgaataactctttcagaaggtactcggttctttgcaatccagttcgcaacagattgaactgattggaattcaaaccgccttgatacctctgaaatcgacccgatcgccttcacagctttagctgttacattcttgtgttgagatgacat

SEQ ID NO: 1343 - DNA, 711 bp, Escherichia coli
atgccttgtgcgcttaatcttctacttatggtggaaaatgctaaatacaaagactttgccgaaaggctaaacaggtctctccaagagcaatctattggagttaaagaattgtcagagttcagtggtgtctcgtatgagatggcgcggcgctacactcttggtactgcaaagccgagagatgagaagatgattcgaattgcagaaagacttgccgtctcaccggcttatcttgattatggtgtgcctgttaatggtggcgacgcgccagccaaaggcacggtcagaatagagcaattggatgttcatgcttcagccggttccggatatataaaccaaccattccctacaatagtgagctcaatagagattccagaagagaggatcttcgagttgtttggtcgtagaagccttgatggcatcgtcatgataaatgttgatggcgatagcatgatgcccacgctttgcccaaaggacctgcttttcatagacagcaaggttgaacaattcagcggcgacggcgtttatgtgttcaattttgaagacagtacgttcgttaaacgtttgcagaaggtaaaagggcgccgactggcagttctttcagacaatgaacattacccgcccttcttcatagaggagcatgaaatgaatgaactatacatattcggcaagctaatcagatgcttacctctaaaaatgatagagtttggctaa

SEQ ID NO: 1344 - DNA, 198 bp, Escherichia coli
ctatttaaagagcttcttcagcttgtcctcaaccttcctgatttcggaagtaagctggctgctgttgacattgatagtagctccacatcgacaagtgaaacttttgttcgacttgagccaagcgattttcttcttcgtcttagtgccgcacttagggcatgcgggtaacgtaatttcctggttatcaaaagcgcccat

SEQ ID NO: 1345 - DNA, 918 bp, Escherichia coli
atgaataatccgtttttcaaaaatatgttggtgtatcgcattagtcgcgatttcaccatcaaccaggaagagctggaacagcagcttgaactatttcgcttcactccatgcggtagccaggatatggcaaaaaccggttgggtatcaccacttggtcagctgtcagatcgcttgcatcacactgtcaataatcaagtgttgttggttattcgccgggaagaaaaaatactgccatctcctgtcattactgaagaactgcgcaagcgtgtgtcgcgtctagaatccgatcaggggcgtcgcctcaaaaaaactgagaaagattcgctgcgtgatgaagtgttgcactccctgcttcctcgggcgttctccaaaaactcgactgttggtttgtggatcaacgtcaccgacggtctgatcatggttgatgcagccagcgctaaacgtgccgaagactcactggccctgcttcgtaaaactctcggttctctcccggtggtaccgctgactatggaaacgccgatcgaactaactatgaccgactgggttcgttccggtagtgcgcctgctggctttggcctgggtgatgaagccgaactgaaagctattcttgaagatggcggtattggacgctttaaaaaacagactctggtcagtgacgaaattcatgtgcatctggaagctggcaaagtagttacaaagctgtctatcgactggcaacagcgcattcagttcgttctttgcgatgacggcagcatcaaacgccttaagttctctaatgagattacagaacaaaacgacgatatcgaccgtgaggatgcggctcagcggttcgacgctgactttgttctgatgaccggcgagcttatctctctcattaacggattaacaacctctctcggcggcgaagccaagcgataa

SEQ ID NO: 1346 - DNA, 540 bp, Escherichia coli
atgagctacattcagacattatccggcaaacattttaattacctcgatatccaacaggacgatatcgtgatcgaggatattgctaccgcgttgtctcatatctgccgctttgcagggcatcttcctgagttttacagtgtcggccagcatagcgttttaaccagccacctcgttccgcaggagtttgcattagaagcactgcttcatgatgctgctgaagcctacctgcaggacatcccctccccacttaagcgcctgcttccggattaccaggcaatcgaagctcgtgtggacgcagccattcggcagaagttcggtctaccaactgagcaacacccaaccgtgaaatatgccgacctggtgatgctcgccagcgaacgccgcgattttgagattgacgaaggttccatttggccatgcctcgagggagttgtcccaacggatttattcattatcaacccagttcgtcctggccagtcatacggcatgttcatcaatcgctttaacgagttgatggagcagcgccaatgcgccgcatga

SEQ ID NO: 1347 - DNA, 255 bp, Escherichia coli
atgaccgtatttgaatatctccaggctcatccgaataccaccagcggtgaaatcgccaaaggtatgaacaaaaagaccccagcggtcgccggagcattatctcagctctatggcaccggtcggatcgtgaagtctggtgttcgcaagggtattccaacataccgcattaacgatatgccgtttggttgcagtaacagcctaaccatgatgtttaaccagctcttgagcagagccagacaaggagcagcccaatga

SEQ ID NO: 1348 - DNA, 348 bp, Escherichia coli
atgacagcactcaacaaacaggcgctgcgtgaagaattccagttcatgcaggacaactatagcgacccggcagaccacgatcggcaggtgatttacatcgaggcggaggcgctgctggatgagttggaagccaaagactcaacgatagcagcacaacaacatgagatccgtatgttgctgaatgcgcttgaggaaaaaccatgcccgaaatgcaacgacacaggaatgactgatagtggcggcacgcagccatggggcgagccgattgagattgaatgcgactgccgacagcaggatgccaacaccgcagaacttgtagccgctggcattggcgtgaagggggagtga

SEQ ID NO: 1349 - DNA, 309 bp, Escherichia coli
atggataaattaatcaaacctaccgccaaaggtaaatatgacggttcatgtgattatctttgctcggaagatgcgcgattcatcgttatgcgcggcgattatacggaagcggaaataattcaggcttctgtgtctcaagatgtaatcgactcggatggtgcggctgattttgcaagtagcgcccgctattatcagtgctggtacaaagttagcccaataggtggtcaggatggctattcaggctggcatcatcctcgtgattcgccgtgtcgcggtgcatatttcgcatcagttttgcaatgggattaa

SEQ ID NO: 1350 - DNA, 468 bp, Escherichia coli
atgacaactaacaaccacccggcgcacggtcctgtatcactcgatcgcctgcaccagatacgcgaacacctgctgcatgatacccaatactcaaacggcgggaacagagcctacattctcgctgatgtattgaaggtgattgatggggctattgcccgcgagctggtacgccgtgagcatgcagcgtggtcacaggctactttcggcgatgtcggtccagttggtccgctgaagcacctttccaaagaagcgctcgaggctgctgctgaaccaggcgaccttagcgaatgggctgacatgcaattcctgttatgggatgcgcaacgtcgtgccggtatcagtgatgagcagattacccaggcaatgataaaaaagctggctataaataaggttcgccaatggcctgagccgaaagacggggaacctcgattgcatatcaaagaacagtcagagcaggagaaaaaataa

SEQ ID NO: 1351 - DNA, 255 bp, Escherichia coli
atgtttagcctgattcggcgcggtcaaatctacacggacagtagcaactggcccgtaattatccatagctgtagtgatcactcggtccgaattaaacgcaatgatggcgagctgagaacgattagcatcaaacgctttaacgaagattttgaacgagtggagcatgatgagtatcgcaaaatatgtgccgaaatagagcaggaaacaaacctgaaaaacctacgtgcgatgcgtcgcggcaagattactgaatag

SEQ ID NO: 1352 - DNA, 570 bp, Escherichia coli
gtgaacaacttaatgatcgaccttgagtccatgggcaaaaaaccgaatgcccctattgtctccattggtgccgtattcttcgatccgcaaagcggtgaactgggtcaggagttttacaccgctgttaatcttgaaagcgctatggagcagggagcggtgccggatggtgacactattctgtggtggttaagacaaagctcagaagcacgatcagcaatctgtgttgatgatgcgatgccgatatcatctgccctatctgaactgagccatttcattaatcggcattctgataaccctaaatatttaaaagtttggggcaatggagctactttcgacaacgttatattgcgcggcgcatatgagcgtgccggccaggtttgcccgtggcaattttggaatgatcacgacgtcagaaccatcgtcacattaggcagatctgtaggtttcgatcctaagcgtgatatgccatttgatggggttgcacataacgcactggctgatgcccgccaccaggcgaaatatgtttcagcgatttggcagaaactaatcccaaccaccagcaacagctaa

SEQ ID NO: 1353 - DNA, 237 bp, Escherichia coli
atgagcaatattttccagttagctcccaacgattgggtttgtgaaagcgttttgatcgcggttactgggctcaaacccggaaccatcctccgtgccagaaaagaatgctggatgattgggagggagtatatccacgtatcgcctgacggaaatcctaaaccttccagtgagtgcatgtataacagaaaggctgtagatgcctgggtcgcttcaatgaaaagcaagcaaccagggtga

SEQ ID NO: 1354 - DNA, 1314 bp, Escherichia coli
atggataaagtcacatatccaacaggcgtcgaaaaccacggtggcacattacgcatctggtttaattttaaaggtaagcgtgtcagggaaagtctcggtgtccctgacaccgctaagaacaggaagatagccggggaactgcggacatcagtatgttttgccatccgcacaggaacctttgattatgcaacccagtttcctgactcccctaacctcaaggcttttggtgtaagtaaaaaagacattacagtgaaagaacttgaagaaaaatggctggatctgaaacggatggaaatctgcgcgaacgcatttaatcgctatgaatctgtcgcaaggaatatggtgccgaggatcggaggtaatcgcctggtgtcagcagtaaccaaagaggaattgctgtatctgaggaaatatttgctaactggttatcagaatccgacgaaaaacaaagccccggcaaaagggcgaagcgttgttactgtgaactattacatgacgacaatggccggaatgtttcagtttgctgcggatcacggttacttagaggtgaacccattcgagggaattaagcctctgaaaaaagccagggcagaaccagatcctctgtctcgtgatgaatttattcgcctgatagatgcatgccggcatcagcagacgaaaaacctgtggtcattagcagtgtacacaggaatgcgtcacggggaactggtctccctggcctgggaagatatcgacctgaaggctggaacaattaccgtcagacgtaattatacgaaacttggtgagttcactctaccgaaaaccgaggcaagcacagatcgagtggtgcatcttatccagcccgcaatcagtatcctgaaaaatcaggctgaaatgacaaggctgggcaggcaatatcacattgaagtgcagttacgtgagtacggccgttcggtgaaccatgagtgtacattcgtctttaatccgcatgtggtcagacgcagtaagcaggtcggatttatctaccgggtcgattcagtaggcgactcatgggaagcggcacttaagcgtgcggggatcagacacagaaaggcgtaccagtcacgacacacctatgcgtgctggtcattatcagctggtgcaaaccctagttttattgccagtcagatggggcatgcgagcgcgcagatggtgttcaatgtttacggtgcatggatggctgacagcagcgcagagcagatcgcaatgctgaatcagaagctggcagattttgccccattgatgccccatagccacgagaacagtacgggaggattattaaaatcagtaagttaa

SEQ ID NO: 1355 - DNA, 726 bp, Escherichia coli
gtggagggtaacaccacgctttatgccctgccgaaacccgaggttgtcctgcgctggcgtgagcagaccacagatgacttccgcttctgttttaagtttccggcgaccatttcgcatcaggcagcattacggcattgcgatgatttagtgactgaatttttgacccgcatgtcaccgttggctccgcgcattggacaatactggctgcaactgcctgccacattcggcccacgggagctgcctgcgctttggcattttctcgattctcttcccggtgaatttaattatggggtggaagtccgccatccacagtttttcgccaaaggggaagaggaacaaacgcttaatcgcggtttacatcagcgcggcgttaatcgggtgattttagacagccgcccggttcatgcagcacgtccatacagtgaagctattcgcgacgctcaacgaaaaaaacctaaagttccggtacatgctgtactgacggcgaaaaatccactgatccgttttatcggtagtgatgatatgacgcaaaaccgggaattatttcaggtctggttacaaaaattagcgcagtggcatcagaccactacgccttatctttttttacatacgccagatattgcccaggccccggaactggtacataccctgtgggaagacttacgtaaaacgcttccagagatcggagcagttccggctattccacagcaatcttctcttttctga

SEQ ID NO: 1356 - DNA, 396 bp, Escherichia coli
atggtaagcgcgctgtatgccgttttaagtgcgttgttattaatgaagttctcttttgatgtcgttcgcctgcgaatgcagtaccgcgttgcctatggcgacggcggttttagcgaactgcaaagcgctattcgcattcatggtaacgcggtggaatatattcctatcgcgattgtgttgatgctgtttatggaaatgaatggcgcagaaacctggatggtgcatatttgcggcatcgttttgcttgctggtcgtctgatgcattattacggttttcatcaccgtctgttccgctggcgacgttctggcatgagcgccacctggtgtgcgctgttgctgatggtgctggcgaatctttggtatatgccctgggagttggttttctccctgcgttag

SEQ ID NO: 1357 - DNA, 744 bp, Escherichia coli
atgtctcaccgcgacacgctattttctgcccctatcgccagactgggcgactggacctttgatgaacgggtagctgaagtcttcccggatatgatccagcgttccgttcccggctattccaatattatttccatgattggtatgttagccgagcgcttcgttcaacctggtacgcaggtttacgatctgggttgttctctgggcgcggcgacgctctcggtgcgtcgcaacattcatcatgataattgcaaaattattgccatcgacaactccccggcgatgattgaacgctgccgtcgtcatattgacgcctataaagcccctacgccagtagacgttattgaaggtgatattcgcgatatcgccattgaaaacgcatcgatggtggtgctgaattttaccctgcaattcctggaaccttccgagcgccaggcgttactggataaaatttatcaagggctgaacccgggcggtgcgctggtgctttcggaaaaattcagtttcgaagatgccaaagttggtgaactgctgttcaacatgcaccacgactttaaacgtgccaacggttacagcgaactggagatcagccagaaacgcagcatgctggaaaacgtgatgctgaccgattccgtggaaacccataaagcacgcctgcataaagccggttttgagcatagcgagctgtggttccagtgctttaactttggttcactggtggcattaaaagcagaggacgctgcatga

SEQ ID NO: 1358 - DNA, 972 bp, Escherichia coli
atgatcgactttggtaacttttattctctgattgccaaaaatcatctttcacactggctcgaaacgctgcccgcgcagattgctaactggcagcgcgagcagcagcacgggctgtttaagcagtggtccaacgcggtggaatttctgcctgaaattaaaccgtatcgtctggatttattgcatagcgtaaccgccgaaagcgaagagccactgagcgccgggcaaattaagcgcattgaaacgctgatgcgcaacctgatgccgtggcgcaaagggccgttctcactgtatggcgtcaacatcgataccgaatggcgttccgactggaaatgggatcgcgttatgccccatctttctgatttaaccgggcgcaccattcttgatgtcggctgtggcagcggttatcacatgtggcgcatgattggcgcaggggcgcatctggcggtgggtatcgatcccacgcagctattcctctgccagtttgaagcagtgcgtaaactgctgggtaacgatcagcgcgcacatttgttaccgttaggtattgaacaacttccggcactgaaagcctttgataccgtcttttcgatgggcgtgctttatcatcgtcgttcaccgctggagcatctctggcagttaaaagaccaactggtgaatgaaggcgaactggtgctggaaacgctggttattgatggcgacgaaaacacggtgctggtgccgggcgatcgttacgctcaaatgcgtaatgtctatttcattccttccgcgctggcgctgaaaaactggctgaagaagtgtggttttgttgatattcgcattgcagatgtgagcgttaccaccacagaagagcagcgacgcaccgaatggatggtcaccgagtctctggccgattttctcgacccgcatgatccgggtaaaacggtggaaggttatcctgcgcctaaacgcgcggtgctgattgcgcgcaagccgtaa

SEQ ID NO: 1359 - protein, 323 aa, Escherichia coli
METKKNNSEYIPEFDKSFRHPRYWGAWLGVAAMAGIALTPPKFRDPILARLGRFAGRLGKSSRRRALINLSLCFPERSEAEREAIVDEMFATAPQAMVMMAELAIRGPEKIQPRVDWQGLEIIEEIRRNNEKVIFLVPHGWAVDIPAMLMASQGQKMAAMFHNQGNPVFDYVWNTVRRRFGGRLHARNDGIKPFIQSVRQGYWGYYLPDQDHGPEHSEFVDFFATYKATLPAIGRLMKVCRARVVPLFPIYDGKTHRLTIQVRPPMDDLLEADDHTIARRMNEEVEIFVGPRPEQYTWILKLLKTRKPGEIQPYKRKDLYPIK

SEQ ID NO: 1360 - protein, 440 aa, Escherichia coli [sequence omitted]

SEQ ID NO: 1361 - protein, 310 aa, Escherichia coli
MLHKKTLLFAALSAALWGGATQAADAAVVASLKPVGFIASAIADGVTETEVLLPDGASEHDYSLRPSDVKRLQNADLVVWVGPEMEAFMQKPVSKLPEAKQVTIAQLENVKPLLMKSIHGDDDDHDHAEKSDEDHHHGDFNMHLWLSPEIARATAVAIHGKLVELMPQSRAKLDANLKDFEAQLASTEKQVGNELAPLKGKGYFVFHDAYGYFEKQFGLTPLGHFTVNPEIQPGAQRLHEIRTQLVEQKATCVFAEPQFRPAVVESVARGTSVRMGTLDPLGTNIKLGKTSYSEFLNQLANQYASCLKGD

SEQ ID NO: 1362 - protein, 251 aa, Escherichia coli
MTSLVSLENVSVSFGQRRVLSDVSLELKPGKILTLLGPNGAGKSTLVRVVLGLVTPDEGVIKRNGKLRIGYVPQKLYLDTTLPLTVNRFLRLRPGTHKEDILPALKRVQAGHLINAPMQKLSGGETQRVLLARALLNRPQLLVLDEPTQGVDVNGQVALYDLIDQLRRELDCGVLMVSHDLHLVMAKTDEVLCLNHHICCSGTPEVVSLHPEFISMFGPRGAEQLGIYRHHHNHRHDLQGRIVLRRGNDRS

SEQ ID NO: 1363 - protein, 261 aa, Escherichia coli
MIELLFPGWLAGIMLACAAGPLGSFVVWRRMSYFGDTLAHASLLGVAFGLLLDVNPFYAVIAVTLLLAGGLVWLEKRPQLAIDTLLGIMAHSALSLGLVVVSLMSNIRVDLMAYLFGDLLAVTPEDLISIAIGVVIVVAILFWQWRNLLSMTISPDLAFVDGVKLQRVKLLLMLVTALTIGVAMKFVGALIITSLLIIPAATARRFARTPEQMAGVAVLVGMVAVTGGLTFSAFYDTPAGPSVVLCAALLFIISMMKKQAS

SEQ ID NO: 1364 - protein, 336 aa, Escherichia coli
MIEADRLISAGTTLPEDVADRAIRPKLLEEYVGQPQVRSQMEIFIKAAKLRGDALDHLLIFGPPGLGKTTLANIVANEMGVNLRTTSGPVLEKAGDLAAMLTNLEPHDVLFIDEIHRLSPVVEEVLYPAMEDYQLDIMIGEGPAARSIKIDLPPFTLIGATTRAGSLTSPLRDRFGIVQRLEFYQVPDLQYIVSRSARFMGLEMSDDGALEVARRARGTPRIANRLLRRVRDFAEVKHDGTISADIAAQALDMLNVDAEGFDYMDRKLLLAVIDKFFGGPVGLDNLAAAIGEERETIEDVLEPYLIQQGFLQRTPRGRMATVRAWNHFGITPPEMP

SEQ ID NO: 1365 - protein, 203 aa, Escherichia coli
MIGRLRGIIIEKQPPLVLIEVGGVGYEVHMPMTCFYELPEAGQEAIVFTHFVVREDAQLLYGFNNKQERTLFKELIKTNGVGPKLALAILSGMSAQQFVNAVEREEVGALVKLPGIGKKTAERLIVEMKDRFKGLHGDLFTPAADLVLTSPASPATDDAEQEAVAALVALGYKPQEASRMVSKIARPDASSETLIREALRAAL

SEQ ID NO: 1366 - protein, 200 aa, Escherichia coli
MNINYPAEYEIGDIVFTCISAALFGQISAASNCWSNHVGIIIGHNGEDFLVAESRVPLSTITTLSRFIKRSANQRYAIKRLDAGLTEQQNQRIVEQVPSRLRKIYHTGFKYESSRQFCSKFVFDIYKEALCIPVGEIETFGELLNSNPNAKLTFWKFWFLGSIPWERKTVTPASLWHHPGLVLIHAVGVETPQPELTEAV

SEQ ID NO: 1367 - protein, 173 aa, Escherichia coli
MAIILGIDPGSRVTGYGVIRQVGRQLSYLGSGCIRTKVDDLPSRLKLIYAGVTEIITQFQPDYFAIEQVFMAKNADSALKLGQARGVAIVAAVNQELPVFEYAARQVKQTVVGIGSAEKSQVQHMVRTLLKLPANPQADAADALAIAITHCHVSQNAMQMSESRLNLARGRLR

SEQ ID NO: 1368 - protein, 246 aa, Escherichia coli
MAGHSKWANTRHRKAAQDAKRGKIFTKIIRELVTAAKLGGGDPDANPRLRAAIDKALSNNMTRDTLNRAIARGVGGDDDANMETIIYEGYGPGGTAIMIECLSDNRNRTVAEVRHAFSKCGGNLGTDGSVAYLFSKKGVISFEKGDEDTIMEAALEAGAEDVVTYDDGAIDVYTAWEEMGKVRDALEAAGLKADSAEVSMIPSTKADMDAETAPKLMRLIDMLEDCDDVQEVYHNGEISDEVAATL

SEQ ID NO: 1369 - protein, 147 aa, Escherichia coli
MAYKRPVSILVVIYAQDTKRVLMLQRRDDPDFWQSVTGSVEEGETAPQAAMREVKEEVTIDVVAEQLTLIDCQRTVEFEIFSHLRHRYAPGVTRNTESWFCLALPHERQIVFTEHLAYKWLDASAAAALTKSWSNRQAIEQFVINAA

SEQ ID NO: 1370 - protein, 590 aa, Escherichia coli
MRTEYCGQLRLSHVGQQVTLCGWVNRRRDLGSLIFIDMRDREGIVQVFFDPDRADALKLASELRNEFCIQVTGTVRARDEKNINRDMATGEIEVLASSLTIINRADVLPLDSNHVNTEEARLKYRYLDLRRPEMAQRLKTRAKITSLVRRFMDDHGFLDIETPMLTKATPEGARDYLVPSRVHKGKFYALPQSPQLFKQLLMMSGFDRYYQIVKCFRDEDLRADRQPEFTQIDVETSFMTAPQVREVMEALVRHLWLEVKGVDLGDFPVMTFAEAERRYGSDKPDLRNPMELTDVADLLKSVEFAVFAGPANDPKGRVAALRVPGGASLTRKQIDEYGNFVKIYGAKGLAYIKVNERAKGLEGINSPVAKFLNAEIIEAILERTGAQDGDMIFFGADNKKIVADAMGALRLKVGKDLGLTDESKWAPLWVIDFPMFEDDGEGGLTAMHHPFTSPKDMTAAELKAAPENAVANAYDMVINGYEVGGGSVRIHNGDMQQTVFGILGINEEEQREKFGFLLDALKYGTPPHAGLAFGLDRLTMLLTGTDNIRDVIAFPKTTAAACLMTEAPSFANPTALAELSIQVVKKAENN

SEQ ID NO: 1371 - protein, 188 aa, Escherichia coli
MLELNAKTTALVVIDLQEGILPFAGGPHTADEVVNRAGKLAAKFRASGQPVFLVRVGWSADYAEALKQPVDAPSPAKVLPENWWQHPAALGATDSDIEIIKRQWGAFYGTDLELQLRRRGIDTIVLCGISTNIGVESTARNAWELGFNLVIAEDACSAASAEQHNNSINHIYPRIARVRSVEEILNAL

SEQ ID NO: 1372 - protein, 129 aa, Escherichia coli
MGFPSPAADYVETRISLDQQLISQPAATYFMRASRSHFREGIIQGALLVVDASLTACDGSLLICAIDGEFRIKRYRTHPQPHLVNLDNGRREALPADDDGYSSAPAIFGVITYIINDARNAEFDDCPVM

SEQ ID NO: 1373 - protein, 80 aa, Escherichia coli
MFVELVYDKRNFDGLPGAKDIILGELTKRVHRIFPDADVRVKPMMTLPAINTDASKHEKEQISRTVQEMFEEAEFWLVSE

SEQ ID NO: 1374 - protein, 126 aa, Escherichia coli
MLWRIFIFVNVGLGEAAKRNVGTGENQIPDMSAFPSGNNWFQLPSGHIVQIFSMNVLGADANGTSANYPIAFPTTMIAVSALWSDGTVANAPTYKMMGNTTNRTTLTIKVSASSGTYGTMIIAVGR

SEQ ID NO: 1375 - protein, 147 aa, Escherichia coli
MNKYSYSPSENAFYAVALKNTYELSGTWPADALDIPDDISVKYMAEPPQGKIRVAGENGFPTWAEIPPPSHEELIEQAESERQLLINQANEYMNSKQWPGKAAIGRLKGEELAQYNSWLDYLDALELVDTSGTPDIEWPTPPAVQAR

SEQ ID NO: 1376 - protein, 197 aa, Escherichia coli
MKPVFDENGLAAVPGDMRCFYYDAVTSEYTGWSDEYINTGVSMPACSTGIDPDENIPGRVAVFTGKGWSHEEDHRNETVYSIENGAAVTVDYIGAIKNGYVTLSPLTPYDKWDGEKWVTDTEAQHGASVEAAEAQRQSLIDAAMASISLIQLKLQAGRKLTQAETTRLNAVLDYIDAVTATDTSTAPDVIWPELPEA

SEQ ID NO: 1377 - protein, 310 aa, Escherichia coli
MIYSTGTISINGNTATGSGTNWTAPASQVRAGQTIIVMSNPVQLFQISSVNSATSMTVTPAVSPALSGQKYGILVSDNISVDGLAQAMSQLIKEYDENIGAWETFATTSANQSITVTINGTAVTIPGIGKLAQKGSNGAVTVADGGTGATNAADARTNLGLGEGSPAIGVPFFWPSAAMPNTVIDSWSSMVFLKFNGAKFSATDYPVLAKVFPSLVLPEARGDFIRVWDDGRGADGGRELLSWQEATNFSQFAGNIGGGAGHAINFHDGIAGNQPGFSRFNFNSNSVGDGVNFVAVRPRNIAFNFLVRAK

SEQ ID NO: 1378 - protein, 1308 aa, Escherichia coli
MGEKMQLLKQETILQGAKGGGGSSHTPVEQPDDLLSVAKLKMLIAVSEGEIQGDLTAQNIFLNDTPLANDSGEYNFSGVKWEFRKGTQDQTYIAGMPQVDNELAVGTTVTTTAPWTRQFTNLSLDAIRIKLSLPVQYLYKDNGDMVGTVTEYAIDLSTDGGAWKTVVNGKFDGKTTTEYQRDHRIDLPKSTSGWSVRVRRITADASGSNSKLVNAFKVFSYAEVIDSKLRYPLTALLYVEVDSSQFNGSAPKVTCKIKGKLIKVPDNYDPKTRTYSGSWSGGFKMAWSNNPAWIFYDLVLDEIYGMGTRVDASMVDKWALYSIAQYCDEMVSDGAGGTEPRFTCNVFIQSQEDAWQVLNDLAAVFRGITFWGNDQIYVQADVPQDDVDWVYNVSNVIDGLFTYAGGSYKNRYSSCLVSWSDPQNHYSDTVEGVYDSALVERYDVRQTSLTAIGCTSQSEAHRRGRWVLLSNAKDGTVSFGVGLDGYIPLPAEIIGVADPFRSGKENGGRISAANGRQITLDREIDYAAKDRLVVNLPDGKAQTRTISAVSADKKTVTVATAFSQVPVAGAVWAIDSDNLAIQYFRVTSIAANDDSTGGFTITAVQHDPNKYRYIDDGVRVESPPITVTPISVLSAPKNIVVTESDHVSQGLTVASLDVSWDKVEGAIRYVAQWRKDNGDWINVPVTSAQGFSVQGIYSGSYDVRVRALNAQDTSSPWGYGETTYLSGKTGKPGTPLNFLATEDVVWHIDLTWKFPDGSGDTAYTEIQRATTADYANPELLVLVPYPAADYQHGPMPAGVRQWYRARLIDRIGNAGDWTDWIMGTSSIDVSEITNDILEDMKESETFKDLIENAVDSNEKIAGMANDIKQANDELEQQAKDIAKNAQDVGKVQTSVNELSSTVGNVSSSLSQLEQTVATADTALGQRIDNISVSMDGMTGGVKNSAIAIIQANLAQVATRKTLSASVAGNSANLDRLDEVIVSEKEATARSLLSLQTDVNGNKASINSLNQTLSDYQQATATQINGITATVNGHTSAITTNAQAIANVNGELSAMYNIKVGVSSNGQYYAAGMGIGVENTPSGMQSQVIFLADRFAVTTAAGNSVALPFVIQNGQTFIRASFIQDGTIENAKIGNYIQSNNYAAGSAGWKLNKAGDAEFNNVTVRGVVYASGGSFTGEIQATSGKFKGTVEAQSFIGDIANMHTGTNVSRSSDGYLEKVMTYNDSSSSGHARHVCVIANVKGNGAGTIDINGNESGSSVQDMERLIMHSAVVTGPNVTVRIKVSAQNNRGASISSPTIIVSHGSGSFTG

SEQ ID NO: 1379 - protein, 205 aa, Escherichia coli
MVKTLILEGKMAKKFGKRVQFDVADLREMLRAMCSQVPGFKKYMSEAHMKGIRFAFFNGGNNIGLEEFDMTRGGSVYRIVPVYEGAKSSGVLQIVVGAVALVAAFFTAGASMAAWGAAMSATAISATSILTGVGVSMMLGGVVQMLTPQPSFGAGKSSSTDNTPNYAFGAPVNTVAMGHPVPLAYGLTEAGGAIVSAGMYSSDQQ

SEQ ID NO: 1380 - protein, 239 aa, Escherichia coli
MREKLLDAIRQHVAAEYPKEACGLIVQSGQQQIFIPCRNIADKPEETFTLSPEDQLAARARGEIIMLIHSHPDVVRLVPSELDRIQCDWSGIEWGIMSWPDGDFCTISPREDRDYAGRQWVLGYADCWSLIREFYLREYGIVLGNYSVPYEWWESGKERLYDDNWEREGFVEIAAGAMQPGDIIMMSVQASVTNHAAVYVGDNIILHHLFGHLSSRTPYGKYYRDRTVRVVRHKDRMHG

SEQ ID NO: 1381 - protein, 245 aa, Escherichia coli
MSFTADIQQLEPGSVIQLIEIDGTEFGMDQVLRFHAHNIQEEGWAAFAAENLPAIIWQGNQYDPHPYELKGMELSSTGSQPTPTLSVGNVGNYVTALCLEYDDMVRAKVKIHTTLSKYLDAANWKNGNPGASPADERLQLFYVNAKTAETRVQVDFELCSPFDIQSLQLPTRQITPVCTWCMRGWYRSGTGCDYNGTKYFTKDGTPTDDPSKDVCGGRRQDCQDRHGPDAPLPFGGFPAANLQGK

SEQ ID NO: 1382 - protein, 112 aa, Escherichia coli
MTDTFTWRTRKTAQGTETARTLQAQFGDGYKQIAGMGINDKQETWNLDWTGTRQEAAALRAFLMSHVTKSFWWTTPWGEKKLFRMKADSFSVSFPTGKKATVAFTFEQAFAP

SEQ ID NO: 1383 - protein, 1045 aa, Escherichia coli
MAQQISDLVINLDVDSATFSEQVARIKGQLTGMAEDSEKVQTRMQRASERQAAAFKTVGDAGAAAAADMKSRQSAATEGLTKDWQNVSKSVDETHRRVTELNQRMRENDGQAAALARRQDELAASFFRQIDGVRQLNGETQSLANVQARFRAARAQGNITQQDYLALISRTTARQKELQIVEEKSAAARTRFLSQLKQQVAEQKLSGTELLRMKAAQVGASDAAEVYIRKLEAAKVATHGLGLQSAAARQELGILIGEVMRGNFGALRGSGITLANRAGWIDQLLSLRGLGIASMVGGIAAAVFGLGKAWYDGSKESEEFNRQLILTGNYAGKTSGQLQALARSLAGNGITQHAAAGVLAQVVGSGAFSGNDVSMVSNVAARLQQATGQAVDETINQFKRLKDDPVNAVATLNDSLHFLTATQYEQIASAQALGDSQKAAELAMRAYSDAVIQRAGAVEDNLGSLEKAWNWVKNAASGAWDAMLGVGRNPDTAMKRQDSFAEWQAAEKEYRALSSNLKVDPDYAGNNVLQKADAERLRNARQQVELKKQAYDLADQQYAQEGLAAAREKMRTDQQAQAIRSQQQFNQLVESGATAAEKRASAEKKLSQLIEKNRQDAKDGVATLWTEKDIAAARAGIEKQWKDPKTPKGKSYSTPAGDKAEEKAQAELLTLQAQLKTLEQHTSVNDVISKQRQDLWQTENQFTVLQEAAGRRQLTAQEKSLLAHKEETLEYKRQLADLGDKVASQQKLNQLADQAVKFEQQQKAARAGLQAQSEGLSTREAGRQTTLQRLSESYSYNPQAQQKVLEEQRATFEAEDALRANWLAGAKQGWAEYQDSATNVFSSVQQISQATFSGLAGQLTSLTTTGKASFREFTSSILKMIVSVINQLLVAYTIQSAMGWVSGGAKTSSAGQSFAVPSYRPQGFDVGGFTGHGGKYEPAGIVHRGEFVFTKESTSRIGVANLYRLMRGYASGGLVGGGNAAGAGMGGISVYAPVSISQQGSDGSINQANATGTAKQLQAIVQQTITERLKKEMSAGGVLYSRRTQ

SEQ ID NO: 1384 - protein, 90 aa, Escherichia coli
MLAGMTSTELGDWHQFYREHYFQDAQLDAHFSELLYSISTLFFRDPELTPAHFSLLSPSGIVISDDEPDDDALMAAAEGITGGIRYGPAD

SEQ ID NO: 1385 - protein, 143 aa, Escherichia coli
MFLKKEKFTWQKESLTIFELSALQRIEYITFMAAEEKAVSADSDGISDQEMTARLIGSNIRCGARLIAMSLWHNDPAGTDVETLYQQVLSGWPPEAIGKAEMEIKLLSGMLVPVEDDKAADPDAPAEAESAEPVAAEKPLPAS

SEQ ID NO: 1386 - protein, 247 aa, Escherichia coli
MPTPNPLAPVKGAGTTLWLYTGTGNAFANPLSDIDWNRLAKIKELTPGEMTAESYDDTYLDDEDADWNATAQGAKSAGDTSFTLAWKPGEEGQKDLVAWFIDGSVRYYKIKYPNGTVDVFRGWCSSLGKAIPAKEVITRTAKITNTGKPELAEESGTPNIPVTGVTLDKATASVAVGATTTLNVTVNPASASDTSFRVATSDGAKATVTVSGNAITVTGVAAGTADVIVMTSDGNFVAVCKVTVTAA

SEQ ID NO: 1387 - protein, 133 aa, Escherichia coli
MNRHSAIRAAILAKLKAEITDTVTWFDGRPVFLEEQDLPAVAVYLSDAEYTGDSLDEDSWQAVVHIEVFLKASSPDSALDSWMEEKVYPAMAFIPGLTELVETFTPQGYDYQRDDEMATWGSVDFTYLITYSI

SEQ ID NO: 1388 - protein, 190 aa, Escherichia coli
MKGLERAIQNLNSLSRLIVPEATAKALNRVARRTISQGSKAVAKEATVDDNRKKGLPVRLVRQRSRLRKARHDRPVASIKINRGNLPAIKLGTARVRLSRKKGARNGAGSVLKIGPYTFRNAFIQQLANGRWQVMRRVGQARYPIDVVKVPLETPLTVAFTAISKRLIESDMPKELSAALKNQLRIHLKR

SEQ ID NO: 1389 - protein, 80 aa, Escherichia coli
MDAATIKKMGKTAIINGSSYDVVPAEQLEEMGPLSGTGTSLVVFSELYQPRRNDSVDYDGKNLIVTRYDMFNGKPRIHLE

SEQ ID NO: 1390 - protein, 108 aa, Escherichia coli
MAKNYAQDGKTIPLVNSGATDVHSGDPVVVGKLIAVAITDIPAGDTGDGFTEGVFLLPKVSADAVTAGAQVYLKDGKITIEETDAVAAGIAWEDAGANTTVVEVKINA

SEQ ID NO: 1391 - protein, 648 aa, Escherichia coli
MQASNNSEADIFIYDEIGYWGVTAKQFVNDLRALGDVTHINLYINSPGGDVFDGIAIYNALKHHGAAITVHIDGLAASMASVIAMVGNPVIMPENTMMMIHKPWGFAGGDASDMRDYADLLDKVESVLIPAYAQKTGKSTEEIAVMLEDETWMNGSECLELGFADQVTPSLQAMACIHSKRIEEFEKMPKSIRNMITPPRNTTQRDPVITQPQAPQAKTDPAPDENAIRAQVLAEQKTRVNAIGDLFAMFGNKHMELQNQCVADPDCSVDKAKDLLLAELGKTATPSNKTTQPHIHAGNGNFVADGIRQALMARAGFEGQERDNVYNGMTLREYARMALTEKGIGVASYNPMQMVGLALTHSTSDFGNILLDVANKALIQGWDEAQETFEQWTKKGQLSDFKTAHRVGMGGFPSLRQVREGAEYKYITTSDKGETIALATYGEIFSVTRQAIINDDLNQLTDVPMKMGRAAKATIGDLVYAILTKNPKLSDGKALFHADHKNLSSGAISVASLDESRKLMRLQKEGERTLNIRPAYMLVPVALETLANQTIKSASVKGADINAGIVNPIQNFAEVIAEPRLDEADAKAWYLAAAKGTDTIEVAYLNGVDTPYIDQQEGFTTDGIATKVRIDAGVAPLDYRGMTKSSGQ

SEQ ID NO: 1392 - protein, 499 aa, Escherichia coli
MSFLDDAIGLFSPGWKASRLRARAVIKAYEAVKQTRTHKAQKENRSADQLSQMGAVSLRQQARWLDNNHDLVIGVFDKLEERVVGAKGIIVEPHPMLSNGKIAKKLATDIRRKWGEWSVRPDVTTQFTRPMLERLMLRTWLRDGEVFAQLVRGTGNGLQPVAGVPFWLEALEPDFVPMNSDAATQLNQGVFVDNWGRPKKYQVYKSLPVSGRQFDTKEIDAENMLHLKFTRRLHQTRGTSLLSGVLMRLSALKEYEDSELTAARIAAALGMYIKKGDGQSFDSDSSSDDRELMIQPGMLYDELQAGEEIGMIKSDRPNPNLESFRNGQLRAVSAGSRLSFSSTSRNYNGTYSAQRQELVESTDGYLILQDWFIGSVTRPMYRAWLKMAIAAGEIKLPRGIDMDSLYNAVYSGPVMPWIDPVKEANAWKTQIRGGAATESDWIRASGRNPDDVKSRRKAEVDENREQGLVFDTDPANDKGGTSAEAKEPGAPPSESQRKK

SEQ ID NO: 1393 - protein, 71 aa, Escherichia coli
MNPADIQNMIDRYAAAELSVLEGKSITFNGQQMTLENLSEIRKGRQEWERRLATLNNKRRGRPGYRLARFG

SEQ ID NO: 1394 - protein, 700 aa, Escherichia coli
MAKRASARDIRRDVSGILRAPRRMPVADAVSTYMRVPMGAGNSVPWDPDLAPYVIEPMNCLASREYDAVVFVGPARTGKTIGLIDGWIVYNIVCDPADMLVIQVSEEKAREHSKKRLDRTFRCSPEVKTRLSPRRNDNNVYDRTFRAGNYLKLGWPSVNIMSSSDYKSVALTDYDRFPEDIDGEGDAFSLASKRTTTFMSSGMTLVESSPGRDIRDTKWRRSTPHEAPPTTGILSLYNRGDRRRLYWPCPHCGEYFQPEMDNMTGYRDSSDPVLASEAAFLQCPACKGRITPDMKRALNMKCVWLRDGQTIDRKGLVSGDGRRSRIASFWMEGPAAAYQTWAQLIYKFLTAEQEYESTRSEETLKTVINTDFGRPYLPRASMEQRKSELLEQRAEDVPKRSVPNGVQFLTATVDVQAGRNRRFVVQITGYGSMGERWIVDRYNIRHSLRCDGNGESIQVDPASYPEDWDLLLTDVFDKTWPLAADPSKGMRLMSMAVDSGGEDGVTDNAYKFWRRCRREGLGKRIYLFKGDSVRRSKLIQRTFPDNTGRSTRRAQATGDVPLYLLQTDALKDRVNNALWRDSPGPGYVHFPAWLGSWFYDELTYEERSNEGKWSKPGRGANEAFDLLVYADALAILSGYEKIKWPSAPEWARRETWIEDTQTEAGEMPSPPPAPKSKPKPKREKPVTEQANPWSSSGGWV

SEQ ID NO: 1395 - protein, 162 aa, Escherichia coli
MDQEIATLKLNINQLAGITGVHRQTVAARLKNVEPAPGSNSKLKLYLVTDILTELMIPTVSANIDDMPPSDRLSHWKAENERLKFEQDTGQLIPADEVAREFSLMAKAVVMVLETLPDVLERDCALTPAAVVRVQSVIDDLRDQMAEKVQDAGKEEEQPEED

SEQ ID NO: 1396 - protein, 242 aa, Escherichia coli
MSNKIITLSGAANEVLYALFFRGALLSGDLPSKSGTAELRELGFAETRHTATEYQKENHFTFLTSEGQKFAVEHLVNTRFGEQQYCASMTLGVEIDTSAAQKAIDELDQRIRDTVSFELIRNGVSFIKDAAIANGAIHAAAIETPQPVTNIYNISLGIQRDEPAQNKVTVSADKFKVKPGVDTNIETLIENALKNAAECAALDVTKQMAADKKAMDELASYVRTAIMMECFPGGVIWQQCRR

SEQ ID NO: 1397 - protein, 76 aa, Escherichia coli
MKILAFINPPGSYMQIETKEMVIFLRDDGISLQYPDGQCAGYGIDGNMLIFMGQSCELFPTKIILHDQRTTNFTHK

SEQ ID NO: 1398 - protein, 198 aa, Escherichia coli
MDYYHEIDFPSLFARAVESDDDVGTTLRIHLLCERMVEAWICACCDCQDLFGRDKNKLLIECNTKISMAGNLGIPPELMKSLKTINSMRNDLAHNPSIQSIADSRIQSLKDTLTEYFKQHPTEPSMEESKLGIFNAENQLTEEVSLDSDSSKNRLKLILLFSKLMQALMQLVAANHNGRWDNQFSQFVYHVTMNATKR

SEQ ID NO: 1399 - protein, 65 aa, Escherichia coli
MTVVLTAKQIEDLAAFAKEDGQPQYTITTGTIPEFEADNGEIIPGYTGLIAYSESLDHGVLQLDD

SEQ ID NO: 1400 - protein, 159 aa, Escherichia coli
MVIVALVGSFLAGSEWTNRSWKIKWADRDSAESSQEANAQTAARMIEQGRTIARDEAVKDAQAQAASAAVTSAGLATTVKQLRAEATKLATHMDAAKHTADLATSVRSKTAGANAAMLADMLGSLAEAARYYAGRSDESYRAGMTCERIYESVRLSNNQ

SEQ ID NO: 1401 - protein, 182 aa, Escherichia coli
MAMSLKLKNKLSAAVVGLILAGASAPVILDQFLDEKEGNSLTAYRDGGGLWTICRGATMVDGKPVVQGMKLSAEKCAQVNAIERDKALAWVDRNIKVPLTEPQKAGIASFCPYNIGPGKCFPSTFYKRINAGDTKGACEAIRWWIKDGGRDCRLTKGQKDGCYGQVERRDQESALTCWGIDQ

SEQ ID NO: 1402 - protein, 92 aa, Escherichia coli
MTRMSTIYSRLSYGSGTTLAGCGVSAKAYAETAKTAKEVSWMLADRIAGLSLSDWAIIVGIACTVITCAVNWYFRWKEREDRRNGYVSKAEE

SEQ ID NO: 1403 - protein, 350 aa, Escherichia coli
MKNTVKINSVELINADSLHYVATLPDNSIDLIVTDPPYFKVKPNGWDNQWKGDEDYLRWLDSCLAEYARVLKPAGSIYLFCGHRLASDIEIMMRARFNVLNHIIWAKPSGRWNGCNKESLRAYFPSTERILFAEHYLGPYTGKEDVYERKSTELKQHIMTPLIDYFRNARESLGVSSKEIAEATGKKNMASHWFGASQWQLPNEVDYRKLQELFTRIAIDKHIQQKLEHPHHQLVATYQSLNRKYSELLEEYKILRRCFSVSALVPYTDVWTHKPVQFYPGKHPCEKPADMLKQIISASSRPGDIVADFFMGSGSTVKAAIELGRRAIGVELEADRFIQTTEEVEKLKKS

SEQ ID NO: 1404 - protein, 63 aa, Escherichia coli
MLNQEDMTETAKAVFNELSDKPATAGEIAQNTHLSHERCQLILTQLVMAGLSDYQFGCYKRLQ

SEQ ID NO: 1405 - protein, 299 aa, Escherichia coli
MPNWIDVLGEMGTIAQRTPADEVRHKYLRDLSKHTGRNVISYYSGFLQKGGPGFQHLIQMSDDDKNGLMSAINGLDTSLGLDILLHTPGGDIAALESIGHYLRSKFGTNIRAIVPMISMSCGTMLACCAEQIVLGKQSNLGPIDPQFNGLSSHAIIEEYERAKAEIFANPAALQWWQFTFQKLNPTLIGECEKAILWANEIVQKWLCTGMFAGQADAEAKAKRICDELNNHQATYAHARHIHLDKAQNIGLNIMELESDQTLQDLVLTIHHCYMHSFGTSPAAKIIENHNGSTMMWNIC

SEQ ID NO: 1406 - protein, 68 aa, Escherichia coli
MSAAEFYEKMGIQPQEFQKGESVQHFAMRVLAQQNDLNVRSGVLYSYSTVTPNTTEQNGQQSHQLYSY

SEQ ID NO: 1407 - protein, 229 aa, Escherichia coli
MNQQDLNFVRIELRRALPDLSGGTKGQLEAFSEHPPADKNATPRRGIHLVELEGEKGPRFVNSLSAPLYVLETRSRRRPMPPIKDAEFESAPWRRAVSALSGYQQAWLRYCYGFDLSYKHQVMMCEYVWKTYQKCLGDNSLQERVVKKLIGLVWLAGQEIAATRNNETYKDYAGAALARMVSVDRSTWLRVYSGHWAGLKAAFTQLDESALAMALEYYEEEEALKVAEM

SEQ ID NO: 1408 - protein, 331 aa, Escherichia coli
MRALLTPEIAHRMGIVLFRPGAELMHLFMRGRVLLEPEPEEMASFSTGAVPAAIQPLADDPVMRQVFENDRVIQRAGGLPSLEQWLSNRFECQWPHSSWHDKNFTTMRHPPGSIRLCWHCDHTLSGQHTEQLAGIAAGNLVSWILEVIRRDSGFPESHILTLPELCWWMVRNDLADVIPESVAHKGLRLPDDKIRSVMRESDIVPSASATSLVQEKAKKILTLSVDPESPESFMLRPKRRRWINETYTRWVKTQPCECCRRPADDPHHIVGHGMGGTATKAHDLFVIPLCRECHDELHADVPAFEQKHGTQLELLLRFMDRALAIGVIAKA

SEQ ID NO: 1409 - protein, 227 aa, Escherichia coli
MSQLATTALTMSSSDIAELVESRHDHVKRSIERLAERGVIELPPMGEVKNHLNQSVSVYLIGKRDSYIVVAQLSPEFTARLVDRWQELEQAQQQTIPQSFSEALRLAADLAEQKQQLTNELAAAAPKVAFVDRYCTASGSMSFRQVAKLLKAKEPDLRLFLLENDIMYRLGGTMTPRHQHIDAGRFEVKTGTSVTSNHAFSQARFTAKGVRWIGGLWAEHIARGQVA

SEQ ID NO: 1410 - protein, 128 aa, Escherichia coli
MKLILPFPPSVNTYWRAPNKGPLAGRHLISAAGRKYQSAACVAIIEQLRRLPKPSTELAAVEITLYPPDARRRDIDNYNKALFDALTHAGVWEDDSQIKRMLVEWGPVVPKGRVEITISRYEPAGAAA

SEQ ID NO: 1411 - protein, 439 aa, Escherichia coli
MMTNKYCQALAALRSKPAHELKEVGDQWRTPDLLFWGINALFGPLVLDLFADDDNAKCPAWYTAEDNALTQDWSERLAELGGAGYGNPPYSRSQYHEKQAITGMTHIMNYAAAQREKGGRYVFLIKAAPSETWWPEDADHIVFIRGRIGFDLPVWFVPADEKQKPTSAFFAGAIAVFDKSWRGERFSYINRTELEAKGRAFMALAQFAASKSQPVTATPPAADKPEAELPLTQKDIFAISGVEAWACVRAAFGDKEEYTFSESKFGHTWAADSVEAPEFTQVSPLTIDKAKLLIRESILFGVDEWLLSIEFDDAAVRLDMSERIRTVALEASGEYGMNSTDFIAAMGSLDVSSWSNIRQIRMHIREKAKPVSDPLPESRIWPLEVRIVFDQVDGADMLDESLQHKLKANINQLWLERTATSEIITAASELVRNMRGEAA

SEQ ID NO: 1412 - protein, 293 aa, Escherichia coli
MSTKLTGYVWDACASSGMKLSSVAIMARLADFSSDEGVSWPSIGTIARQIGAGESTVRTALAQLEKDGWLSRKQRRNGNRNASNVYQLNVVKLREAAFSHLSESDASKSDPSKSDASKSDPSKFEASKSSKKGGFDPSESGGDPSVKSKQEPQVTSKPSCPVAAQPDPEVVITDQARQVLSYLNQTTGSRYQVCSTSLENIRARLREQFTVDDLCLVVDYKNADWRDSEQAQYLRPATLFIPKNFPGYLQSATKWSSAGRPERVNGKWETNSASRANFQSVDYSLPENSGFRS

SEQ ID NO: 1413 - protein, 112 aa, Escherichia coli
MNSVNRFRPAKQFRCLPLVGKDAQFGYVEIINNAADGGNYQPADLMVEAFVQMNEKGREEWLKLTGGSEITTEFPSELSAGSQIHSALYTFAKGTIMSASALLNNSSVNLQN

SEQ ID NO: 1414 - protein, 187 aa, Escherichia coli
MVDSINTAIRLMCKAHKHGRLGMASDLGMTIDQFHNHLYQKCGSRFFTLAELERMEDLSGSCYLAEYQANRKGKWLVDVPTAESLDNVELYSIEMKAAAASGELANAKMAAAADGVIDSSERKMLSELFSKKLRHQIHGFLGFMALYGVGVSDQAIDVFVSTGRKGDARECAAPGALACRISGETNA

SEQ ID NO: 1415 - protein, 85 aa, Escherichia coli
MSSQHKNVTAKAVKAIGSISEVSRRFEFQSVQSVANWIAKNRVPSERVIQLCQWGGWVVTPHQLRPDIYPNKNDGIPSANNNSQL

SEQ ID NO: 1416 - protein, 236 aa, Escherichia coli
MPCALNLLLMVENAKYKDFAERLNRSLQEQSIGVKELSEFSGVSYEMARRYTLGTAKPRDEKMIRIAERLAVSPAYLDYGVPVNGGDAPAKGTVRIEQLDVHASAGSGYINQPFPTIVSSIEIPEERIFELFGRRSLDGIVMINVDGDSMMPTLCPKDLLFIDSKVEQFSGDGVYVFNFEDSTFVKRLQKVKGRRLAVLSDNEHYPPFFIEEHEMNELYIFGKLIRCLPLKMIEFG

SEQ ID NO: 1417 - protein, 65 aa, Escherichia coli
MGAFDNQEITLPACPKCGTKTKKKIAWLKSNKSFTCRCGATINVNSSQLTSEIRKVEDKLKKLFK

SEQ ID NO: 1418 - protein, 305 aa, Escherichia coli
MNNPFFKNMLVYRISRDFTINQEELEQQLELFRFTPCGSQDMAKTGWVSPLGQLSDRLHHTVNNQVLLVIRREEKILPSPVITEELRKRVSRLESDQGRRLKKTEKDSLRDEVLHSLLPRAFSKNSTVGLWINVTDGLIMVDAASAKRAEDSLALLRKTLGSLPVVPLTMETPIELTMTDWVRSGSAPAGFGLGDEAELKAILEDGGIGRFKKQTLVSDEIHVHLEAGKVVTKLSIDWQQRIQFVLCDDGSIKRLKFSNEITEQNDDIDREDAAQRFDADFVLMTGELISLINGLTTSLGGEAKR

SEQ ID NO: 1419 - protein, 179 aa, Escherichia coli
MSYIQTLSGKHFNYLDIQQDDIVIEDIATALSHICRFAGHLPEFYSVGQHSVLTSHLVPQEFALEALLHDAAEAYLQDIPSPLKRLLPDYQAIEARVDAAIRQKFGLPTEQHPTVKYADLVMLASERRDFEIDEGSIWPCLEGVVPTDLFIINPVRPGQSYGMFINRFNELMEQRQCAA

SEQ ID NO: 1420 - protein, 84 aa, Escherichia coli
MTVFEYLQAHPNTTSGEIAKGMNKKTPAVAGALSQLYGTGRIVKSGVRKGIPTYRINDMPFGCSNSLTMMFNQLLSRARQGAAQ

SEQ ID NO: 1421 - protein, 115 aa, Escherichia coli
MTALNKQALREEFQFMQDNYSDPADHDRQVIYIEAEALLDELEAKDSTIAAQQHEIRMLLNALEEKPCPKCNDTGMTDSGGTQPWGEPIEIECDCRQQDANTAELVAAGIGVKGE

SEQ ID NO: 1422 - protein, 102 aa, Escherichia coli
MDKLIKPTAKGKYDGSCDYLCSEDARFIVMRGDYTEAEIIQASVSQDVIDSDGAADFASSARYYQCWYKVSPIGGQDGYSGWHHPRDSPCRGAYFASVLQWD

SEQ ID NO: 1423 - protein, 155 aa, Escherichia coli
MTTNNHPAHGPVSLDRLHQIREHLLHDTQYSNGGNRAYILADVLKVIDGAIARELVRREHAAWSQATFGDVGPVGPLKHLSKEALEAAAEPGDLSEWADMQFLLWDAQRRAGISDEQITQAMIKKLAINKVRQWPEPKDGEPRLHIKEQSEQEKK

SEQ ID NO: 1424 - protein, 84 aa, Escherichia coli
MFSLIRRGQIYTDSSNWPVIIHSCSDHSVRIKRNDGELRTISIKRFNEDFERVEHDEYRKICAEIEQETNLKNLRAMRRGKITE

SEQ ID NO: 1425 - protein, 189 aa, Escherichia coli
MNNLMIDLESMGKKPNAPIVSIGAVFFDPQSGELGQEFYTAVNLESAMEQGAVPDGDTILWWLRQSSEARSAICVDDAMPISSALSELSHFINRHSDNPKYLKVWGNGATFDNVILRGAYERAGQVCPWQFWNDHDVRTIVTLGRSVGFDPKRDMPFDGVAHNALADARHQAKYVSAIWQKLIPTTSNS

SEQ ID NO: 1426 - protein, 78 aa, Escherichia coli
MSNIFQLAPNDWVCESVLIAVTGLKPGTILRARKECWMIGREYIHVSPDGNPKPSSECMYNRKAVDAWVASMKSKQPG

SEQ ID NO: 1427 - protein, 437 aa, Escherichia coli
MDKVTYPTGVENHGGTLRIWFNFKGKRVRESLGVPDTAKNRKIAGELRTSVCFAIRTGTFDYATQFPDSPNLKAFGVSKKDITVKELEEKWLDLKRMEICANAFNRYESVARNMVPRIGGNRLVSAVTKEELLYLRKYLLTGYQNPTKNKAPAKGRSVVTVNYYMTTMAGMFQFAADHGYLEVNPFEGIKPLKKARAEPDPLSRDEFIRLIDACRHQQTKNLWSLAVYTGMRHGELVSLAWEDIDLKAGTITVRRNYTKLGEFTLPKTEASTDRVVHLIQPAISILKNQAEMTRLGRQYHIEVQLREYGRSVNHECTFVFNPHVVRRSKQVGFIYRVDSVGDSWEAALKRAGIRHRKAYQSRHTYACWSLSAGANPSFIASQMGHASAQMVFNVYGAWMADSSAEQIAMLNQKLADFAPLMPHSHENSTGGLLKSVS

SEQ ID NO: 1428 - protein, 241 aa, Escherichia coli
MEGNTTLYALPKPEVVLRWREQTTDDFRFCFKFPATISHQAALRHCDDLVTEFLTRMSPLAPRIGQYWLQLPATFGPRELPALWHFLDSLPGEFNYGVEVRHPQFFAKGEEEQTLNRGLHQRGVNRVILDSRPVHAARPYSEAIRDAQRKKPKVPVHAVLTAKNPLIRFIGSDDMTQNRELFQVWLQKLAQWHQTTTPYLFLHTPDIAQAPELVHTLWEDLRKTLPEIGAVPAIPQQSSLF

SEQ ID NO: 1429 - protein, 131 aa, Escherichia coli
MVSALYAVLSALLLMKFSFDVVRLRMQYRVAYGDGGFSELQSAIRIHGNAVEYIPIAIVLMLFMEMNGAETWMVHICGIVLLAGRLMHYYGFHHRLFRWRRSGMSATWCALLLMVLANLWYMPWELVFSLR

SEQ ID NO: 1430 - protein, 247 aa, Escherichia coli
MSHRDTLFSAPIARLGDWTFDERVAEVFPDMIQRSVPGYSNIISMIGMLAERFVQPGTQVYDLGCSLGAATLSVRRNIHHDNCKIIAIDNSPAMIERCRRHIDAYKAPTPVDVIEGDIRDIAIENASMVVLNFTLQFLEPSERQALLDKIYQGLNPGGALVLSEKFSFEDAKVGELLFNMHHDFKRANGYSELEISQKRSMLENVMLTDSVETHKARLHKAGFEHSELWFQCFNFGSLVALKAEDAA

SEQ ID NO: 1431 - protein, 323 aa, Escherichia coli
MIDFGNFYSLIAKNHLSHWLETLPAQIANWQREQQHGLFKQWSNAVEFLPEIKPYRLDLLHSVTAESEEPLSAGQIKRIETLMRNLMPWRKGPFSLYGVNIDTEWRSDWKWDRVMPHLSDLTGRTILDVGCGSGYHMWRMIGAGAHLAVGIDPTQLFLCQFEAVRKLLGNDQRAHLLPLGIEQLPALKAFDTVFSMGVLYHRRSPLEHLWQLKDQLVNEGELVLETLVIDGDENTVLVPGDRYAQMRNVYFIPSALALKNWLKKCGFVDIRIADVSVTTTEEQRRTEWMVTESLADFLDPHDPGKTVEGYPAPKRAVLIARKP

SEQ ID NO: 1432 - DNA, 9687 bp, Escherichia coli
aatcgccggtgtactccgcgtcagaaaggtatacagccacggcagggagatcctgctcttcaagaaaaacagggcgcccgtcaaaccaggtgaccgtgtcggtgatctcggctttcagtttggccagaatggctgcacgaattgcgctgtgtctgttcatcgcttcaggtggatcctcagttggtttttcagggctgcggaaagttctttgggcatatcgctttcaataaggcgctttgaaatagcggtgaaggccacggtgagcggtgtctcaagaggaactttgaccacatcaatcggataacgggcctgacctacgcgccgcatgacctgccagcgcccgttcgcaagctgttggataaaagcgttacgaaaggtatagggcccgattttaaggacgctgcccgctccgtttctggccccttttttacgcgagagcctgacgcgcgccgtgccgagctttatcgcaggaagattaccgcggttgatttttatcgacgcgaccgggcgatcgtgacgggccttgcgcagacgggaacgctggcggaccagacgaaccggaagcccctttttccggttatcatcaactgttgcttctttcgctacagctttgctcccctggcttatcgttcttctggccaccctgttaagtgcttttgcggttgcctcaggaacgattaaccggctgaggctgttcaggttctgaatagccctttccagtcctttcacagacatagcgcctcctcattcgagatggatgcggggttttccgttgaacatgtcatagcgggtaacgatcaggttcttaccgtcgtagtcgacgctgtcgtttcggcgtggctggtaaagctcagagaaaaccaccagcgaagtacctgttcccgacaatggccccatttcctcgagttgctcggcgggaacaacgtcatagctgctgccattgatgatcgctgtctttcccatcttttttatagtggccgcgtccatgcgcgccgccatccggtcaaaggagttaggcattgatcttaacttcaacaacggtggtgtttgcccctgcatcttcccaggcgatgcccgcggcaacggcgtccgtttcttcgatcgtgattttgccgtccttcagatacacctgcgccccggcagtaaccgcatctgcggatacttttggcaggaggaaaacaccctcagtaaaaccgtccccggtatcgccagccgggatatcggtaattgccaccgcgataagttttccaacaacaaccgggtcgccgctgtgaacatcggttgcaccactgtttaccagagggatcgttttcccgtcctgcgcatagttcttagccataacttctccattcagcccctttcgaggctggtttcaggtataaaaaaagcccttacgggcgtctgtttgtcaggactgttttttactgaccagaggatttggtcatgccgcgatagtccagcggcgccacgccagcatcaatacgcactttcgtggcgataccatcagtggtgaagccttcctgctgatcgatgtatggcgtgtcgacgccgttgagataagcgacctcaatggtgtcggtgcccttcgcggcagccagataccaggctttcgcatcagcttcatccagacgtggttcggcaatgacttctgcaaagttctggatagggttaacgatcccggcattgatgtctgcacctttaacactggccgacttgatggtctgatttgccagagtttccagggcgacgggcaccagcatgtaggccggacggatattcagggttcgctccccctccttctgcagacgcatcagcttgcgcgattcgtccaggctggccacagaaattgcacccgagctcaggttcttgtgatcggcatggaacagcgcctttccgtctgagagtttcgggtttttggtcagaatggcgtaaaccagatcgccaatcgttgctttcgccgcgcgccccatcttcatcggtacgtcggtaagctggttcagatcgtcgttgatgatcgcctggcgagttactgagaagatttcaccatacgtggcaagcgcgatggtttcgcctttgtcactggtagtgatgtacttgtactcagccccttcgcgaacctgtcgcagagaagggaacccacccataccgacacgatgcgccgttttgaagtccgacagctggccttttttggtccactgctcgaaggtttcctgcgcctcgtcccagccctgaatcagcgctttgttcgcaacatcaagcagaatgttgccaaagtcagaggtgctgtgggtcagcgccaggccaaccatctgcatcgggttgtagctggccacgccgatacctttttctgtcagggccatacgcgcatactcgcgcagcgtcataccgttataaacgttatcccgctcctgaccttcgaacccggcacgcgccatcagtgcctggcgaataccatccgcgacgaagttaccgttgcccgcatgaatatgcggctgagtggttttattggacggcgtggccgttttaccgagttctgccagcagcaaatctttcgccttatcgacggagcaatcagggtcggccacacactgattctgcagttccatgtgcttattaccgaacatggcaaagagatcgccgatagcgttaacacgggttttctgctcagccaacacctgcgcgcggatcgcattttcatccggtgccgggtctgtttttgcctgcggtgcctgaggctgggtaataaccgggtcacgctgggtagtgttgcgcggcggggtgatcatgttgcgaatgctttttggcattttttcaaattcctcaatacgttttgaatgaatacaggccatagcctgaagggatggtgtcacctggtcggcaaaacccagttcaaggcactcgctgccgttcatccaggtttcgtcctccagcattaccgcaatttcttcggtggattttccggttttctgtgcataagccgggataagaacggattcaaccttgtcgagaagatccgcatagtcgcgcatatcgctcgcgtcaccaccagcaaacccccagggcttatggatcatcatcatcgtgttttcaggcatgatgaccggattgcctaccatcgcaatcaccgaggccatggaggccgccagaccgtcgatatgtacggtaatcgccgcgccgtggtgcttcagcgcgttataaatagcaattccgtcgaagacatcaccaccgggcgagttgatataaaggttgatgtgggtgacgtccccaagtgcccggagatcattgacgaactgtttcgccgttacgccccagtacccgatttcgtcataaataaaaatgtcggcctcactgttattgctggcctgcatgcggaaccacgaattactttttgcgctggctttcggacggtggcgcgcccggttctttggcttcggcactggtgcctcctttatcattggcggggtcggtgtcaaacaccaggccctgttcacggttctcgtcaacctcagctttacggcgtgacttaacatcatccgggttgcgaccgctggcacgtatccagtcggattcagtagcagcaccgccgcggatctgcgttttccaggcattcgcttctttaacgggatcaatccacggcataacgggccccgaataaaccgcgttataaagcgagtccatatcaatgcctctcggcagcttgatttctccggcagcaatagccatcttgagccaggctcggtacatgggccgggtcactgaaccgatgaaccagtcctgaagaatcagatagccgtcggttgactcgacaagctcctgccgctgggcactgtacgttccgttgtagtttctggatgtgctggaaaagctgaggcgactgccggcggacacggcacgcagctgtccgttacgaaaagattcgaggttagggttcgggcgatcggatttaatcatcccgatttcttccccggcctgcagttcgtcatagagcataccgggctgaatcatcagctcgcggtcatcgctgcttgaatcagaatcgaagctctgtccgtcgccttttttgatatacatgccgagtgccgcagcaattctggcagcagtaagctccgagtcctcgtattctttcagcgcgctcagacgcatcagaacaccagacaaaagagacgttccgcgggtctggtgcaggcgtcgggtgaatttgagatgcagcatgttctctgcatctatctctttggtatcaaactgacgcccggatactggcaggcttttatagacctgatattttttcgggcgtccccagttatcgacaaaaacgccctgattgagctgggtggcagcatcgctgttcatcggcacaaagtccggctccagcgcttccagccagaacggcacgccagcaaccggctgaagaccatttccggtaccgcgaaccagctgagcaaatacctcaccgtcccggagccacgttcgcagcatcagccgctccagcattgggcgggtaaactgggttgtgacatctggccttacggaccattcgccccactttcggcggatatcagtggccagctttttagcgatcttcccgttactcagcatcggatgcggttcaactatgatgcccttcgcacccaccaccctttcttccagcttgtcgaaaacgccgatcaccagatcgtggttgttatccagccagcgcgcctgctgcctcagcgaaaccgcccccatctggctgagctgatcggctgaacgattttccttctgggctttgtgggtacgcgtttgctttaccgcctcatacgctttaataactgcgcgggcacgcaggcgtgaggctttccagcctggtgaaaacaggccaatcgcatcatctaaaaaactcatccaaacctcgccagcctgtagccgggtcgcccacggcgtttgttattgagcgttgccagtcgtcgctcccattcctgacggccttttctgatttccgacaggttttcgagcgtcatctgctgcccgttgaaagtgattgatttcccctccagaacagacagctcggctgcagcatagcggtcgatcatgttttgaatatctgctggattcacacccaacctcctgacgaagaccacggattagcctgctcggttacgggcttctcacgttttggttttggtttagatttcggcgcaggcggcggggatggcatttcgccagcttccgtctgcgtgtcctcgatccacgtttcccgccgtgcccactcaggagctgacggccatttgattttttcgtaaccactaaggatggcgagcgcgtcggcataaacgagcaggtcaaatgcttcgtttgcgccccggccgggcttactccatttcccttcattcgagcgttcctcatacgtcagttcgtcatagaaccagctgcccagccaggcggggaaatgcacatagccagggccgggtgaatcacgccacagcgcattattcacccggtctttaagggcatcggtctggagaagataaagaggcacatcaccagtcgcctgtgcgcggcgcgttgatctgcccgtgttgtcgggaaacgttcgctggataagtttgctgcgcctgacgctgtcccctttgaagagatagatacgcttacccagcccctcacggcgacatctgcgccagaacttgtaggcattatccgtcacgccatcttcgccccctgagtccacggccatcgacatcagccgcatgccctttgatgggtcagctgcgagcggccacgttttatcaaagacgtcagtgagtaaaagatcccagtcctccggatagctcgccggatccacctgaatgctttcaccgttgccgtcgcagcgcagcgaatgccggatgttgtaacggtcaactatccagcgctcacccatacttccataacccgtaatctgcacaacaaagcgccggttgcgcccggcctgcacgtccacggtcgcagtgagaaactgcacgccgttcggtaccgaacgttttgggacgtcttcggcacgctgctcgagcaattcacttttacgctgctccatgctggctcgcggcaaatagggcctgccgaaatcggtgttgatcaccgtcttcagggtttcttcgctgcgcgtggattcatattcctgctcggcggtcagaaacttataaataagctgcgcccaggtctggtaagcagctgccggaccttccatccagaaggaggcaatacgggaacgacggccatcaccgctaaccaggcctttcctgtcgatggtttgcccgtcccggagccagacacatttcatgttaagcgcacgcttcatgtccggtgtgatcctgcctttacaggcagggcactgaagaaacgccgcttcgctggcaagcacaggatcgctgctgtcgcggtatccggtcatattgtccatttccggctggaaatattcgccgcaatgcgggcatggccagtaaagacgacggcggtcaccacggttatagagcgataaaattccggtggtcggaggggcttcatggggcgtggagcgccgccattttgtgtctctgatatccctcccgggcgagctctcaaccagcgtcatcccggaggacatgaatgtcgtggttcgtttcgatgccagtgaaaaagcatccccctccccgtcgatatcttccggaaagcggtcataatccgtcagcgccacacttttatagtccgaggacgacatgatattgacggatggccagcccagcttcagatagttaccggcgcggaatgtacggtcgtagacgttgttatcgttacgtcttgggcttagccgggttttaacttcagggctacagcgaaaagtacggtccaggcgttttttggaatgctcgcgcgctttttcctcagatacctgaattacaagcatatctgccggatcgcagacaatgttataaacgatccagccgtcaatcagcccgatggttttacccgttcgcgctgggcccacaaacacaaccgcatcgtattcacgcgatgccagacagttcatcggctcaatcacatagggtgccagatccggatcccacggaactgagtttcccgcccccattggcacgcgcatataagtactgaccgcatcggccaccggcatacgacgcggggctcgtaaaataccggaaacatcgcggcggatgtccctggcggatgcccgctttgccatcagtcctcctcaggctgctcctcctcttttccagcgtcctgcaccttctccgccatctggtcgcgcagatcatcgataacgctttgcacacgaactaccgcagcaggcgttaaagcacagtcgcgctcgagcacatccgggagggtttcaagtaccatgacgacggctttcgccatcaatgagaattctcgcgccacttcatctgcgggtattaactgccccgtatcctgttcgaacttcagcctctcgttctctgctttccagtgggacagcctgtcagaagggggcatatcgtcgatgttggccgaaacggtagggatcatcagttcggtcagaatgtcggtcaccagatagagctttaacttgctattgctgcctggagcaggttcaacatttttcagtctcgcggcaaccgtctgacggtgtacgccggttatccctgccagctggttgatattgagttttaaagtggcaatttcctggtccatgatggtgaacactttttgaacgattcgacatgttgcgaaaatggcctctaattaaatcaaagacctgcgcacatgatgatgatgaccctggatccgaaaaactagccgtttcccgcgagcacgccgccccgtggcagggtccccctccgggagtaccttttgataataattatcaattgcacactatcgacggcactgctgccagataacaccaccggggaaacattccatcatgatggccgtgcggacataggaagccagttcatccatcgctttcttgtctgctgccatttgctttgtgacatccagcgccgcacattcagcagcgtttttcagcgcgttttcgatcaacgtttcaatgttggtatcaacaccaggtttaactttgaacttatcggcactgacggttaccttgttctgcgctggctcatcacgctggataccaaggctgatgttgtagatattggtcaccggctgaggtgtttcgattgccgctgcgtggatagcaccatttgcgatagcggcgtccttgatgaatgacactccattgcgaataagttcgaaggagacggtgtcacgaatgcgctggtccagctcgtcgattgccttttgtgcagcagaggtatcaatctcaacgccaagcgtcatcgaagcgcaatattgctgctcaccaaaacgcgtattgaccaggtgttcaacggcaaatttctgcccttctgatgtcagaaaggtaaagtgattttctttctggtattcagttgctgtgtgtctggtttcagcaaaaccaagctcgcgcaattcggctgtgccagatttagaaggcagatcaccagacagcaacgcgccacggaaaaacagcgcataaagcacttcattagcagcgccagatagcgtaatgattttgttactcatggaatatttccttttaggcgtgagcctgtcgcacggcaatgccgcccgagaggtaaacgcaacctaacggcatcacccaggctcactactgaaagactctctttgatgtgcgcgtgcgatgcgcgtagaagactgatttatcaacctgtctttatatcaggattcattacctgactatttgtgggtaaagttcgtagtgcgctgatcgtgcaaaatgattttagttgggaacagttcgcaactctgtcccataaaaatcagcatattcccatctatcccatatccagcgcattgaccatcgggatactgaagggagattccatcatctcttagaaagatcaccatctcttttgtttcaatttgcatatagctacctggaggatttatgaatgcaaggattttcatggactattaccatgagattgattttccatctttattcgcgagagcagtggaaagcgatgacgatgtgggtactacattgcgcattcacctactttgtgagcgcatggtcgaagcatggatatgcgcatgctgtgactgccaagatctctttggaagagataaaaacaaacttttaatcgaatgtaatactaaaatatccatggcgggaaacctgggaatccccccggaacttatgaaatcacttaaaaccatcaactcaatgcgtaatgaccttgcacacaatccatcaatacaaagcattgctgattcaaggatccagagcctgaaggatactctgactgaatactttaaacagcatccaacggaacccagcatggaagaatcaaaactgggtatttttaacgccgagaatcaattaaccgaagaagtttccttagatagtgacagttcaaaaaacagacttaagttaatcttgctgttcagcaagttaatgcaggcgttaatgcaattagttgcagctaatcataatgggcgctgggataaccaatttagccaattcgtttaccatgtgaccatgaacgcaacaaagagataaatccaagcccgttttgtacgggctgttgcattatcacaggcactcagtgaatgcctgctgtaatgccgctagtcgtcgagttgcaacacaccgtg

SEQ ID NO: 1433 - DNA, 49496 bp, Artificial Sequence
  Description of Artificial Sequence: Synthetic polynucleotide
aggcctctcctcgcgagaggcattttttatttgatgggataaagatctttgcgcttatacggttggatttcgcccggtttgcgagttttcagcaattttaatatccaggtgtattgttctggtcgcggaccaacaaaaatctcgacttcttcattcatccgccgcgcaatcgtatgatcatccgcctctaacagatcatccatcggtgggcgcacctgaatcgtcagacgatgcgtcttgccatcataaatcggaaatagcggtacaacgcgcgcacggcacactttcatcaaacgaccaatcgcgggcaacgtcgctttataggtggcaaagaaatcaacaaattcgctgtgttctgggccatgatcctgatcgggtaaataatatccccagtaaccctgacgtaccgactggatgaatggtttaataccatcatttctcgcatgcagacgaccaccaaagcgacggcgcaccgtgttccagacataatcaaaaaccgggttgccctgattatggaacatcgctgccattttctgcccttgcgaggccatcagcatggcaggaatatcgacggcccaaccgtgcggcaccagaaaaatcactttctcgttattacgtcgtatctcttcgatgatctccagcccttgccagtcaacgcgcggctgaattttctccggcccgcgtattgccaactcagccatcattaccatcgcttgcggcgcggtggcaaacatctcatctacaatcgcttcgcgttcagcttcactacgttctggaaagcagagcgacagattgattaacgcacgacggcgtgagctttttcccagtcgtccggcaaaacgtcccagccgtgccagaatgggatcacggaactttggcggcgttaaagcgatacccgccatcgctgctacgcccagccatgctccccagtagcgcgggtggcgaaaggatttatcaaactcaggaatgtattcgctattattttttttcgtttccatgcttttccagtttcggataaggcaaaaatcaatctggtgatagtgtagcggcgcaacttgccccgcaccaaataaaaaagccggtactgactgcgtaccggctgcgaatggatgttaattaatcaaaccgtagctgcggcacaatctctttggcctgtgccaggaattcgcgacgatcggagccggtcagcccttcggtacgcggcagttttgccgtcagcgggtttacggcctgctggtttatccatacttcatagtgcagatgcggcccggttgaacgtccggtattaccggaaagcgcgatacggtcgccacgtttcaccttctgtcccggtttcaccaggatcttgcgcaagtgcatataacgcgtggtgtagctgcgaccatgacgaatagccacataataacctgctgcgccactacgtttggcaaccaccacttcaccgtcacccactgaaagcactggcgtaccttgtggcatggcaaaatcaacacctctgtgtggcgcaacgcgaccggtcaccggattagtacgacgcgggttaaagttagatgagatacggaactgtttcgccgtcgggaatcgcaagaatcctttcgccagaccagtaccgttacgatcgtagaatttgccatcttcagcgcggattgcgtaataatctttaccttctgaacgcaaacgtacgcccagcagctggctttgctcacgtttaccatcaagcatttctcgtgacattaacaccgcaaattcatcgccttttttcagtttgcggaaatccatttgccactgcatggctttaatcactgcgctcacttcggcgctggttaaaccggcgtttctggcgctggcaacaaagcttcccccgacggtacctttcagcagattgttgacccactctccttgctgcatttcgctggtcattttaaaaccgttagcggcagtacggtcataggttcgggtttcacgacgagacacttcccaggtgaggcgctgcagttcgccgtccgcggttaatgtccaggagagttgttgaccgattttcaggttacgcaattctttgtcggcagcagccagttgggtgatatcacccatatcaataccatactgattgagaatgctgcttagcgtatcgccagtggaaacaacatattcatgcacgcccgcttcaccggcgattttgtcatccagttcgtcctggggaatggcttcatcttcttgtgcagcttgatcaatcggctcactggcttcaggtaagagcgaacgaatttcgttctgttccagctcaatggttttgacaattggcgtggcatcgcggtgataaacatagggccgccagacagcgacggccagagtaagaacggtgagcgaccccaacataacgcggtgtggtcgcggtaaattattaaacgccagggcgacagagcgggctatctgttgcacgtaatcacttcctcattaatctcctttcaggcagctcgcatactggttggctaattgattcaggaattctgaatagcttgttttacccagtttgatattcgtccccaggggatccaacgttcccatacgaacggatgtccctcgtgcgacgctctcaacgaccgctggcctgaactgtggctcagcaaaaacgcaggttgctttttgctcaaccaactgtgttcttatttcatgtaaacgctgcgcgccaggttgaatctcagggttaacggtaaaatgaccaagcggtgtcagtccgaactgtttttcgaaatagccgtaagcatcgtgaaaaacgaaataacctttccccttgagcggcgcgagctcgttaccaacctgcttttcggttgaggctaattgtgcctcaaaatccttcaggttggcgtcaagtttggctcgactttgcggcataagttccactaattttccatggattgcaaccgctgtagcccgcgctatctctggggaaagccaaagatgcatgttgaaatcgccgtgatggtgatcttcgtcacttttttccgcgtggtcgtgatcatcatcatcgccgtgaatacttttcatcagcagcggtttcacattctctagctgcgcaatcgttacctgtttcgcttcaggtaatttacttaccggtttttgcatgaacgcttccatctccgggccaacccaaacgactaagtccgcgttctgtaagcgttttacatctgatggacgcagtgaataatcatgttctgaagccccgtcaggtagtaaaacctccgtttctgttaccccatcagcaatggcagaagcgatgaacccaacgggtttaagcgaagcgacaacggcagcatctgcggcctgtgttgcaccgccccagagagcggcggataatgctgcgaaaagaagcgtttttttatgtaacataatgcgaccaatcatcgtaatgaatatgagaagtgtgatattataacatttcatgactactgcaagactaaaattaacatgacaagtctggtttccctggaaaatgtctcggtttcttttggccaacgccgcgtcctctctgatgtgtcgctggaacttaaacctggaaaaattttgactttacttgggccaaacggcgcaggtaagtcgacactggtacgggtagtgctcgggctggtaacacccgatgaaggggttatcaagcgcaacggaaaactgcgcatcggctatgtaccgcagaagctgtatctcgacaccacgttgccactgaccgtaaaccgttttttacgcttacgccctggcacacataaagaagatattttgcctgcactgaaacgtgtccaggccgggcatctgattaacgcaccgatgcaaaagctctcgggtggcgaaacgcagcgtgtactgttagcgcgagcattgttaaatcgaccgcaattattagtgctggatgaacccactcagggcgtggatgtgaatggtcaggtggcgttatatgaccttattgaccaactgcgtcgcgaactggattgtggcgttttaatggtatctcacgatctgcatctggtaatggcaaaaaccgatgaagtgctttgcctgaatcaccacatttgttgttccggcacaccggaagttgtttccctgcatccggagtttatttctatgtttggtcctcgtggtgctgaacaactgggtatctatcgccatcatcataatcatcgtcacgatttacagggacgaattgttttgcgtcggggaaatgatcgctcatgattgaattattatttcccggttggttagccgggatcatgctcgcctgtgccgcgggtccgctgggttcgtttgtagtctggcgtcgtatgtcttatttcggtgatacgctggctcatgcctcattacttggcgtcgcgtttggtttgttgctggacgtgaatccattctatgcggtgattgccgttacgctgctgctggcgggcggtctggtatggctggagaagcgtccacagctggcgatcgacacgttattagggattatggcgcacagtgccctgtcgctgggcctggtggtcgttagtctgatgtctaatattcgtgttgatttgatggcttacctgttcggtgatttactggcagtgacgccagaagatctcatctctattgcgattggcgtggtcatcgtggtggctattttgttctggcaatggcgcaatttgctgtcgatgacgattagcccggatctggcgtttgttgatggtgtgaaattacagcgcgtgaaattgttgttgatgctggtgacggcattgacgattggtgtagcgatgaaattcgtcggcgcgttgattattacttcactgctgattattcctgctgctactgcacgtcgctttgcccgcacgccggaacagatggctggtgtcgctgttttggtggggatggtggcagtgactggcggtttaaccttttccgcattttacgatacacctgcaggcccgtcggtggtgctatgcgcggcactgttatttattatcagtatgatgaaaaagcaggccagctaatctgtcgctgaacacatttgtcggatgcggcgcgagcgccttatcccacctgcggttcgctatctctggtaggcctgataagacgcgaacagcgtcgcatcaggcacactgccagtgtcggatgcggctcgagcgaccaatccgacttacggcatttctggcggcgtgatgccgaagtggttccacgcccgcactgtcgccatacgcccgcgcggtgtacgctgcaaaaagccttgctgaatcaaataaggttccagtacatcctcaatggtttcacgttcttcgccaatggctgccgccaggttatccagacctaccggcccaccaaagaacttatcgattaccgccagcaacaatttgcggtccatataatcgaaaccttcagcatcgacattcaacatatccagcgcctgagcagcgatatctgccgagatggtgccatcgtgcttcacttcagcgaaatcacgcactcgacgcagcagacggttggcaatacgtggcgtaccgcgcgcacgacgagcaacttccagcgcgccgtcatcactcatctcaagccccataaagcgtgcgctgcgactgacgatatattgcagatccggcacctgataaaactccagacgttgcacaataccaaaacgatcgcgcaacggtgatgtcagcgaacctgcgcgcgtggttgcaccaatcagggtaaacggcggcaaatcaattttaatggagcgtgccgccggaccttcaccaatcatgatatccagttggtaatcttccattgccggatacaacacctcttccaccactggtgaaagacggtggatctcatcaataaacagtacatcgtgtggttcaaggttagtgagcattgctgccagatcgcccgccttttccagcaccggaccagaagtcgtgcgtaaattaacgcccatttcattggcgacaatattggcaagcgtagttttacccaaccccggaggaccaaaaatcaatagatgatcgagggcatcgccgcgcagtttcgctgctttgatgaaaatctccatctgcgaacgaacctgcggctgaccaacatactcttccagtaatttagggcgaatggcgcgatctgccacatcttccggcaaagtggtaccggcagaaatcagacggtctgcttcaatcatcctttacctcataacgcggcgcgtagggcttcgcgaattaatgtttcactgctggcgtcagggcgagcgattttgctcaccatgcggcttgcttcttgtggtttatagcccagtgccaccagcgcagcaaccgcttcctgttcagcatcgtcggtcgccgggctggcaggagacgtgagtaccaggtcggcggctggcgtaaagagatcgccatgcaaacctttaaatcggtctttcatttcgacaatcaagcgttcggcggtttttttgccaatacccggcagtttcaccagtgcccccacttcttcacgctcaacggcattaacgaactgctgcgctgacattccggagaggatcgccagcgccaacttcgggccgacgccgttggttttgatcaactctttgaacaacgtgcgctcttgtttattgttaaaaccgtacagcagttgcgcgtcttcacgcaccacaaagtgggtgaaaacgatcgcttcctgacccgcttcagggagttcataaaaacaggtcatcggcatatgcacttcatagcctacgccgcccacttcaattaacaccagcgggggttgtttttcaatgatgatgcctctgagtctgcctatcacatgacgctcctgcgtaatgaatcaaagataatgctgtatgataaaaaaatgctggatagatatccagcgaaggatgaagaaaacttgcgaggtgtctcgatgatctgaaaaatggcgcagtataatttattctacagattatattggaagcaaatatttaaatattacatattcagcgaagaaatgtgtaataaaaatacacattgcgacccctgaaaaaaataaattttttatgctattacgtatattcatatctatttcaatggaatgacaacgtgaatattaattatcctgctgaatatgaaattggtgatatcgtctttacatgtataagtgctgccttatttggtcaaatatcagctgcatcaaattgctggagtaatcacgtcgggatcattatcggtcataacggtgaagactttctggttgcagaaagccgtgttcccctctcaaccatcactacgctatcccgttttattaaacgctctgctaatcaacgctatgctataaagcgattagacgccggactaacagaacaacaaaatcaacgaattgttgaacaggttccttcccggctacgcaaaatttaccacaccggttttaaatacgaatcttcgcgccagttctgttcaaaatttgtttttgatatttataaagaggcgctatgtattccggtgggtgaaatagagacgtttggagaattgttaaatagcaatccaaatgcaaaactcactttctggaaattctggttcttaggttctattccgtgggagcgtaaaaccgtcacgccagccagtttgtggcatcatccgggtttggtgttgattcacgcggtgggagttgaaacgcctcagcctgaactgaccgaggcggtataacttaacgcagtcgccctctcgccaggttcagtcgcgattcgctcatttgcatcgcattctgactaacgtggcagtgggtgatggcaatcgccagcgcatcggcggcatccgcctgtggattagcgggcagtttcagcaaggtgcggaccatatgctgcacctggcttttttcggcactaccaatacctaccactgtttgctttacctgacgtgccgcatattcaaataccggcaattcctgattcaccgccgccacaatcgccacgccgcgcgcctgccccagtttcagggctgagtcagcgttcttcgccataaagacctgttcaatggcgaaataatcaggctggaattgggtgatgatttccgtcacgcccgcatagatgagcttcagacgagacggtaaatcatccactttggtgcgtatgcatccgctacccaggtaggacagttgcctgcctacctggcggatgacgccatagccggtcacgcgcgaacccgggtcaatgccgagaataatagccatcacgcgtctccgttttgctgtttagcaggcctcatcagagagtcgctgcaacctcatcagagatttcaccgttatggtaaacttcctgcacgtcgtcgcaatcttccagcatatcgatcagacgcatcagtttcggtgcggtttctgcatccatatcagctttggtggacgggatcatggaaacttccgcgctgtctgctttcagacctgccgcttccagagcgtcgcgtactttgcccatttcttcccatgcagtgtagacatcaatcgcgccgtcatcataggtcacaacgtcttcagcaccggcttccagggctgcttccatgatggtgtcttcatcgcctttctcgaaggagatcacgccttttttgctgaacaaataagctacggaaccatcagtaccgaggttaccgccacatttgctgaatgcatgacgcacttcagcaacggtacggttgcggttgtcagacagacattcaatcatgattgccgtgccgccaggaccgtaaccttcgtagatgatggtttccatgtttgcatcatcatcaccgcccacacctcgtgcaattgcgcggttcagagtgtcacgggtcatgttgttagacagtgctttatcaattgctgcacgcaaacgcgggttagcgtccggatcaccaccgcccagcttagccgcggttaccagctcacgaatgattttagtgaagattttaccgcgcttagcatcctgcgcagctttacgatgtctggtgttggcccatttactatgacctgccataaaaatatctccagatagccctgcctgttcaggcagcgttaattacaaactgttcaatcgcctgccggttgctccaggacttagtgagcgccgccgcagcagacgcatcaagccacttgtaagccagatgttcagtgaaaacgatctggcgctcgtgcggaagcgcaagacagaaccatgattccgtattacgcgtcacgcccggcgcatagcgatgacgtaaatgtgaaaaaatttcaaactctaccgtgcgctgacagtcaattaaggtcagttgttcagcgacaacatcaatggtgacctcttcctttacttcgcgcatggcagcttgcggcgcggtttcaccctcttccacgctgccggttaccgactgccagaaatcgggatcgtcacgccgctgcaacatcagcacccgtttcgtatcttgtgcgtagatgaccactaagatcgaaacgggacgcttataagccatatcagttattctcagccttcttcacaacctgaatgctcagctcagccagtgcagtcgggttagcaaagctcggcgcttcagtcatcaaacacgctgccgccgtggttttcgggaaggcgataacgtcacggatattgtcggtgccggtcagcagcatcgtcagacggtcaagaccgaatgccaaacctgcgtgcggcggagtaccgtatttcagggcgtcgagcaggaagccgaatttctcgcgctgttcctcttcgttgatacccagaataccaaacaccgtctgctgcatatcaccattatggatacgcacagaaccaccgcccacttcgtaaccattgatgaccatatcgtaagcgttagccaccgcattttccggtgcagctttcagttctgctgccgtcatgtctttcggtgaggtgaacggatggtgcattgctgtcaggccgccttcaccgtcgtcttcaaacatcgggaagtcgataacccacagcggtgcccatttgctttcgtcggtcagaccaaggtctttacccactttcaggcgcagtgcgcccatcgcgtcggcaacaattttcttgttgtcggcaccgaagaaaatcatatcgccatcttgcgcgccagtacgctccaggatggcttcgatgatttctgcattaaggaacttcgctaccgggctattgataccttccagacctttcgcgcgttcgttaactttgatgtaagccagacctttcgcgccgtagattttaacgaagttaccgtattcgtcgatctgcttacgggtcaacgatgcgccgcccggaacacgcagagcggcaacacggcctttcggatcgttcgccggacctgcaaatactgcaaactcaacagatttcagcagatcggcaacgtcggtcagttccatcgggttacgcagatccggtttatcagaaccataacggcgttctgcttctgcaaaggtcattaccgggaaatcgcccagatccacgcccttcacttccagccacagatgacgcaccagcgcttccatcacttcacgcacttgcggcgcggtcatgaaagaagtttccacatcgatctgagtaaattcaggctgacggtcagcacgcaggtcttcgtcacggaagcatttaacgatctgatagtagcggtcaaagccggacatcatcagtagctgtttgaacaactgcggggattgcggcagcgcgtagaatttacctttgtgcacacgagaaggcaccaggtagtcacgcgcgccttcaggcgtggctttggtcagcatcggagtttcgatgtcgaggaagccgtggtcatccataaaacggcgcaccaggctggtgattttagcgcgggttttcaggcgctgagccatttccgggcgacgcaggtcgaggtagcggtatttcagacgcgcttcttcggtgttgacgtggttagagtcaagcggcagaacatctgcacggttgatgatagtcagcgaggacgccagtacttcgatttcgccagtcgccatatcgcggttaatatttttttcgtcacgcgcacgtacggtgcccgtgacctgaatgcagaactcattacgcagttcagaggccagctttaacgcgtccgcacgatccggatcgaaaaatacctgcacgataccttcgcggtcgcgcatatcgatgaagatcaggctaccaagatcacgacgacggttgacccaaccacacagagtcacctgctgccccacgtgggacaaacggagctgtccacaatattctgtacgcatgagatatcccttaacttagctgccggcggatgccccctgctgcgcaggtgaccaagtcgcagcgttagctgtatgtcacaactgaatgaaaaaaggcggctattatactggaaattctgccgcaccgtaagagcctggcccgcgctggaacgcctcgttaccactttatatcgggcctgaaatcagactctacgccagtttgctataaaggtgttgcccgaactcataaaaattaacaaaatttgtcgttccgccatcggctaatcgcattaaggtgagaggcacgattttgttttgtcaggagtcatcatgcttgaacttaatgctaaaaccaccgcgctggtggtgattgatttacaagaaggcatcttgccttttgccggaggtccacatactgccgatgaggtggttaatcgcgccgggaagctggcggcgaaatttcgcgccagcggtcagcccgtgtttctggtgcgcgttggctggtctgccgattacgccgaagcattaaaacagccggttgatgccccctcccccgcaaaagtgttgcccgaaaactggtggcaacatcctgctgcattaggtgcaaccgacagcgatatcgaaatcatcaaacgtcaatggggtgcgttttacggtacggatctggagttgcaattacgccgccggggtatcgatacaatagtgttatgtgggatctcgaccaatatcggtgttgaatccaccgcccgcaatgcctgggaactcggttttaatctggtgattgccgaagatgcctgtagcgccgctagcgccgagcagcacaataacagcattaatcatatctacccgcgcatcgcccgtgtgcgtagcgttgaagagatcctcaacgcgttatgatttacatcggtttgccacaatggtcgcatcctaaatgggtgcggttggggatcaccagccttgaagagtatgcccgccactttaactgcgtgacgcgggcattttaaaaatcactaaagaacgcccaagagcatgtgttttctttagtttattcaatgcattaaaaaatagtttcgcatgaaattcggtaaacttcatgtgtgcaataatgtcccattcatgccccaaaatgccccaaagcagacatttttgccccaagtatgccccacaagtcacgtcttcaagtcgtctatatccatagcacaccgagttacattcttgcatccggggtgtcgacaatacctactttattgagtgtgcgagaattaccaggaacctttccacaatgtagtagtctaatagtcgaatccatctaacattaagaagcgttatgatcactagcctctcattgatatcttctgtaatagtcactctatgtatcatggtgttcgctacagtaaaggtagggattggtttgtctaacaatccagacagaaatgataattaacctcaaccacgtaaccacacttcatacttcatacttcacttaacagtgaagtgctcacatcaccgggcagtcatcaaactccgcattcctggcatcattaatgatgtacgtgatcactccaaatatagcgggtgcagaactgtaaccatcatcatctgctggcagcgcttcccttctcccgttatccagattaaccaggtgcggctgaggatgagtccgatatcgcttgatcctgaattccccgtcgattgcacatatcagcagtgaaccatcgcaggcagtaagtgacgcatccacaacaagcaacgctccctggattatcccttccctgaaatgtgaacgcgatgcccgcatgaaataagtcgctgcgggctgactgattagctgctgatcgagggagattcgtgtttcaacataatctgccgcaggtgaaggaaatcccatgtttacgccctctcttgaataccggataaaaacacagtataaatactgtatatccatccagcaaagaggcaatgagcaatgttcgtggaactcgtttatgacaaaaggaattttgatggtctgcccggtgcaaaagatatcattctgggcgagttaactaagagagttcaccggatcttccccgatgctgatgttcgggttaaaccgatgatgacactgccggcgatcaacactgacgccagcaagcatgagaaggaacagataagccgtactgttcaggaaatgtttgaagaggctgaattctggttagtgagtgagtaaagattttcaatgcccgccacagttacgtattgattatgctgtggaggatattcattttcgtaaacgttggtttgggagaagcggcaaaacggaatgtgggaacaggggaaaatcagataccagatatgtctgcatttccatctggcaataactggtttcagttaccaagtggacatatcgttcagatattttccatgaacgttcttggtgcagatgctaatggcacgtcagctaattaccccattgcttttccaacaacgatgattgctgtcagtgctctatggtctgatgggactgtagcaaatgcaccgacatacaagatgatggggaacacgactaacagaacaactttgacgataaaagtatcagccagctcaggtacttacgggacaatgattattgcggtgggacgataatatgaataaatacagttactctccttcagaaaatgccttttatgctgttgcgttaaaaaatacctatgaattgagtggcacatggccagctgatgcattagatattcctgatgacatttctgtaaaatatatggcggaaccgccacaagggaaaatccgagttgcaggggaaaatggttttcccacatgggctgaaatacctccaccatcacatgaggaacttattgaacaggccgaatcagagaggcaattattgattaaccaggccaacgaatacatgaacagtaaacaatggcccggtaaagccgctattggtcgtctgaaaggcgaggaactggcacaatataattcgtggctggattatctggacgcactggaactggtcgatacttccggtacgcccgatattgaatggcctacgcctccggcagttcaggccagatgacatccggcgcggtgctggtatctgttgcagtcaccgcgtcaatgtaatccagcacggcgttaagtcgggttgtttctgcctgagtcagtttccgtccggcctgtaatttcagctgaatcagactaatggaagccattgctgcatcaatcagtgattggcgctgtgcttctgccgcttctactgaggcaccgtgttgtgcctcagtatctgtcacccatttctcaccatcccatttatcatatggcgttaacggtgaaagcgtgacataaccgtttttgatggcaccgatataatccactgtaacagctgcgccattttcgattgagtaaacagtctcattgcgatggtcttcctcatggctccatcccttacctgtaaatactgccactcttcccggaatgttttcgtccgggtcaataccagtggaacaggcgggcatacttacgccagtattaatatattcatcagaccagcccgtatattcagacgttactgcatcataataaaaacaacgcatatcacccggcactgcagccagcccattttcatcaaaaacaggtttcattatttagccctcaccagaaagttaaatgcaatatttcgcggtctgacagcaacaaaattcacaccatcacccacagagttactgttgaaattaaatcgtgaaaatcctggctgatttccggcgatgccatcatgaaagttaattgcgtgtccagcacctccgcctatattcccggcaaactgagaaaagtttgtagcttcctgccagcttaataattcgcgaccaccatctgcacctcgcccgtcatcccagacacgaatgaaatcaccgcgggcttcaggtaataccagcgaaggaaacactttcgccagcacaggataatcagtggcagagaatttcgcgccgttgaacttcaaaaacaccatactggaccagctgtcgattacagtatttggcattgcagcggacggccagaagaacggaacgccaatagctggagaaccttctcccaaaccaaggtttgtgcgagcgtctgcggcattcgttgcgccggttccgccgtctgcgacagtaaccgcaccgttgctccctttctgcgcaagtttaccgatgcctgggatggttacggcggtgccgttgatggtaactgtgatgctttggtttgctgaggtggtggcgaacgtctcccacgcgccaatattctcgtcgtactctttgatgagctgtgacatggcctgcgccaggccgtcgactgagatattgtccgacacaaggattccatacttctggccgctcagcgccggggaaactgctggcgtaaccgtcattgacgtggcgctgttcacggatgaaatctgaaacagctgcaccgggttagacatcacgataatcgtctggccagcgcggacctggctggcgggagctgtccagtttgtgccggagccggttgcggtatttccgttaatagagatagttccggtgctataaatcataacaactcctaaatttagacaacatgaagcccggagaggtatataaccctcaccagaaataatttctgaattggtttttaatacatgttgggcaacgccagtgttggcatagctatagttgtatcaaatgccattgaccacccacccaaataataattgccgactactttattcctttctgctctgacattcccacctgtcattacaattcctttatacctaatatttccgtaaccaccaacgtgtcgacagttagccccggtataaacaatctggcaaaattcatcaccaatattcaggttcgcattggcgatatttattgtcccatcaaaaatgaatggcttcgtgcaagtaagaagacgtttgcgttgacgattggtttattcaatccatcaactaaaatatcatgtaaacgaattgccataacatttcccactttattttacttactcaacacaacaagtatattaaaattgaaccttgtcaacaacacaaaggagtcccaatgaaactcgctctaattatgctgccattatgtctgtccctcactgcatgtggtaatggtttaaataccggtaaaccaaattccggtgtcattccaaaacctttggatcgagatggtaacggttctttaatttatgataccgaaaaccttccaatgacggggcagtggtgtcacgagattgatcacgaataccgacgaatcggtagcccttctaactgtgttatagactactaaatattaacccctcaaaagaggggttaatattttaacctgtgaatgaaccagatccgtgtgatactatgatagtaggcgaagaaattgacgcacccctgttattttgagcggacactttaatacgcactgttacgtttggacctgttacaaccgcagaatgcatgataagtctctccatgtcttgcacggatgaaccactctcattgccgttaatgtcgattgttcctgcaccattacctttaacgtttgctataacacagacgtgtcttgcgtgcccagaactggatgaatcattataagtcattaccttttctaaatatccgtcactagaccgactcacattcgtccctgtgtgcatatttgcaatgtccccgataaaactttgggcttccacagtccctttgaatttaccgcttgttgcttggatctcaccagtaaagctaccgccactagcatatactacacctctgacggtcacattgttgaattcagcatctccagctttattcaacttccaaccagcagaaccagctgcatagttgttggactggatatagttaccgatttttgcgttctcaatggtgccgtcctggatgaagctggcccggatgaatgtctgcccgttctggatcacgaacggcaaagctacgctatttccggctgccgtggtgacggcgaagcggtcagccaggaagataacctgcgactgcatgccggatggcgtattctccacgccgatacccatccccgcggcgtaatactgcccgttgctggagacaccaaccttgatgttgtacatcgcgctgagttcgccattaacgttggctatagcctgagcgttagtggtgatggcggaggtatgcccgttcacggtcgccgtgatgccgtttatctgcgtggcggtggcctgctgatagtcggagagcgtctgattcaggctgttgatggatgccttgttgccgttgacgtccgtctgcaggctcagcaatgaacgtgctgtggcttccttctcactgacgatcacctcgtcgagacggtccagattcgcgctgttgccggcgaccgatgcagaaagggttttacgcgtggccacctgagcgaggttggcctggattatcgcaattgcagagttcttcaccccgcccgtcatgccgtccatagaaacgctgatgttgtcgattcgctggcccagggcggtatcagccgtcgcaacggtctgctcaagctgactgagtgaagacgaaacattcccgaccgtgctggaaagctcattaacgctggtctgaaccttcccgacgtcctgggcatttttggcgatatctttcgcttgctgctccagttcgtcgttggcctgtttgatatcgttagccatgccagcaattttttcgttgctgtccaccgcgttctcgatcaggtctttgaacgtttccgactctttcatatcctccagaatgtcattagttatttcgctgacatctatcgaggacgtgcccatgatccagtcggtccagtccccggcgttaccgatacggtcaatcaggcgcgcgcggtaccactggcgaacgccggcaggcatggggccatgctgataatctgcagccgggtacggcaccaggaccagcagttcaggattggcgtagtcggcagttgtggcgcgctgaatctctgtataggccgtgtcgcctgagccatccggaaatttccaggtcaggtcgatatgccagaccacatcttcggtcgccaggaagttgagcggagtacccggttttcccgttttaccggagagataagttgtttcaccgtatccccatggtgacgacgtatcctgcgcattcagcgcccgtacgcgcacgtcatagctgcccgaataaatgccctgaaccgagaaaccctgcgcgctggtaaccggaacgtttatccagtccccgttgtccttacgccactgggcaacataccggattgcgccctctaccttatcccatgacacgtccaggcttgctacagtcagcccctgagacacatgatcgctctcagtcaccacgatattcttcggagcagacaggacgcttatcggcgtgacggtgatcgggggagactcgacccgaacgccgtcatcgatgtaacgatatttgtttggatcgtgctgaacggccgtaatagtgaaaccgcctgtactgtcgtcgttagccgcgattgaggtgaccctgaagtactgtattgcgaggttatcactgtctatcgcccaaacagcgcccgccacaggaacctgactgaatgccgtagccaccgtcaccgtttttttatcggcgctcaccgcgctgattgtccgcgtctgggcttttccgtcgggaaggttaaccaccagccggtctttcgccgcgtagtctatttctcgatcgagggtaatttggcggccgttggccgcgcttatacggcccccgttctccttaccagagcggaaaggatcggcgacaccgataatttcagcgggcaaagggatataaccgtccagccccacgccaaacgatacggtcccgtctttggcattggagagcaatacccagcgaccgcgtcggtgcgcttcactttgcgaggtgcagccgattgcggtcagggacgtctgccggacgtcgtaacgttctacaagcgccgaatcgtaaaccccctcaacggtatcgctgtaatggttctgcggatcggaccaggacaccaggcaggagctgtagcgattcttgtatgagccgcccgcataagtaaacagcccatcgataacgtttgagacgttataaacccagtcaacatcgtcctgcgggacgtctgcctggacataaatctgatcgtttccccagaacgttattccacgaaataccgcggcgagatcgttaagtacctgccaggcgtcctcctggctctgaatgaaaacgttgcaggtgaaacgcggttcggtgccaccggccccgtcggaaaccatttcgtcacagtactgggcgattgaatacagcgcccacttatccaccatggacgcatccacgcgcgtgcccatgccgtaaatttcatccagaaccagatcgtaaaagatccaggcagggttattggaccatgccattttgaacccgccggaccatgaaccagaataggttcgggttttcggatcgtaattatccggaaccttaatcagcttgccttttatcttacaggtcactttcggcgcgctgccgttgaattggctgctgtccacttcgacatacaggagcgctgttaaaggataacgaagcttgctgtcgatgacttccgcatacgaaaacaccttgaaggcgttaaccagtttcgaatttgatccgctggcatcagccgtaatacgcctgaccctgacagaccagccggacgtggattttggcagatcgatacggtggtcacgctgatattccgtcgtggtctttccgtcaaacttgccgtttacaaccgttttccaggcgccgccgtccgttgataaatcgatcgcatactcggtgaccgtgcccaccatatcgccattatctttatagagatactggaccggaaggctgagcttgatacggatggcatccagggaaaggtttgtaaactggcgcgtccagggcgcggtggtggtgacagttgtgcccacggccagctcgttgtcgacctggggcatcccggcaatataggtctggtcctgtgtgcccttgcggaactcccatttcacgccgctgaagttgtattccccgctgtcgtttgccagcggcgtatcgttgagaaaaatgttctgagcggtcaggtcgccctgtatttccccctcagaaacggcaatgagcatttttaattttgcgaccgacagcagatcgtcaggctgctcaaccggagtatgtgaactgccacctccccctttggcaccctgcaggatggtttcttgtttaagaagctgcattttttcacccataaaaaaaggtgccgaagcacctttaagttagtggccgctggcctactgctgatcgctcgagtacataccggcgctgactatcgctccccctgcctcagtcagaccgtaggccagggggacaggatgccccatagcgacggtattgaccggcgccccgaaggcgtagttaggcgtgttgtccgtgctggaggatttacccgcgccgaaggatggctggggcgtgagcatctggacaacgccccccagcatcatcgacactccgacccctgtcagaattgacgtggcgctgatagctgttgcactcatcgccgcgccccaggctgccatgctcgcaccagcggtaaagaatgcagcgaccagcgcaacagccccgacaactatctgcaggacgcccgaacttttggccccctcataaacgggcacgatccggtacacgcttccaccgcgggtcatatcaaactcttccagcccgatattgttgccaccgttaaaaaaggcgaaacggatccccttcatatgagcttcagacatatattttttgaatccgggaacctgtgaacacatggccctgagcatctcgcgcaggtcggcaacatcaaactgaacgcgtttaccgaatttttttgccattttaccttcgagaataagcgtcttaaccatgcattctgtccttatgcctgaccacccggaccgttctgtcgcgataatattttccataaggcgttcgcgaagaaaggtgcccgaaaagatgatggagaatgatgttatcacccacatataccgcggcgtgattagtcaccgatgcctgcacactcatcatgatgatatctccgggctgcattgcaccggcggcaatctcaacgaatccctcacgctcccagttgtcgtcgtagagacgctccttgccgctctcccaccattcgtaaggtactgaataattgccgagaacaatgccgtattcgcgcagataaaattcacggataagcgaccagcagtcggcgtaacccagcacccactgccgcccggcataatcccggtcttcacgcggggaaatcgtacaaaaatccccgtccggccaggacatgatcccccactcaatccccgaccagtcgcactggatccggtccagctctgagggcaccagccgaaccacatccggatgggaatgaatgagcatgatgatctcaccgcgcgcgcgggcagcgagctggtcttccggggagagcgtgaatgtctcctcgggtttatcggcaatgttgcggcagggaataaagatttgttgctggcctgactgaacaatcaggccgcaggcttctttggggtattcagcagcgacgtgctgacggatagcatccagcaatttttcacgcatttttatttcccctgcaggtttgcagccggaaaaccgccgaacggcagcggcgcatccgggccgtgacgatcctgacaatcctgccggcggccgccacaaacatctttcgacgggtcatcggtcggtgtaccgtctttggtaaagtatttcgtgccgttgtaatcgcatccggtcccgcttcggtaccagccccgcatacaccaggtgcagacaggcgtaatctgccgtgtcggcagctgcaggctctgaatatcgaaaggagaacacagctcgaaatcaacctgtacccgcgtctctgcggttttagcattgacgtaaaagagctgtaagcgctcatcggccgggctggcacccggattaccgtttttccagttggcggcatcgagatacttcgaaagcgtggtatggattttgaccttagccctgaccatatcgtcatattcaagacacagcgcggtgacatagtttccgacgttcccgacggacagcgtgggcgttggctgggaacctgtactcgataactccatccccttaagttcgtagggatggggatcgtactggtttccctgccagataatggcgggcagattttctgcggcgaaggctgcccacccctcttcctgaatattgtgcgcatgaaaacgcagcacctgatccataccgaattcagtgccgtcgatctcaatcagctgaataacgctgccgggctcaagctgttgtatgtctgccgtaaaactcatactccccccataaaaaaaagccgcccggaggcagctttcagtgtttttcgagaaaatcagggcgcgaacgcctgttcaaaagtgaaggccacagtggcttttttcccggtagggaaagaaacgctgaacgaatcggccttcattctgaacagctttttttcaccccatggagtggtccaccagaacgatttagtaacgtgagacatcaggaaagcgcgcagcgcagccgcctcctgtctggtgcccgtccagtccaggttccacgtttcctgtttgtcgttgatccccatccccgctatctgtttgtagccatccccgaactgggcctgcagcgttcgggctgtttcagtgccctgcgctgtttttcgcgtgcgccaggtaaacgtgtccgtcactgtgtcctcctcgaataaagcacgccgcccgcggacatttcttttttcagtcgctcggtgattgtctgctgaacaatcgcctgcagctgtttcgccgtccccgtggcgttcgcctgatttatgcttccgtcactcccctgctggctgatgctgactggggcataaacactgatcccgcccatgccagcaccggctgcgttcccgccgccgaccagaccacccgaggcatacccgcgcatcaggcgatagagattagccacgccgatgcggctggttgattctttggtgaagacgaattccccgcggtgaacgataccggctggctcgtacttgccgccgtgcccggtaaaaccgcccacgtcaaaaccctgtggccggtatgacgggaccgcgaatgactgaccggcagaggaggttttcgccccgccgctaacccagcccattgcactctggatggtgtaagccaccagcagctggttgataacggacacaatcattttaaggatcgagctggtgaattccctgaagctcgccttcccggttgtcgtcaggctggtaagctggcccgccaacccgctgaacgtagcctgagaaatctgctgaacggagctgaaaacgtttgtcgctgaatcctgatattcggcccaaccctgtttcgcaccggccagccagtttgcacgcagggcatcttcagcttcgaacgtcgccctttgctcttccagaaccttttgctgcgcctgagggttgtacgaatagctttcgctgagacgctgcagcgtagtttgtcgcccggcttcccgggtggataacccctcagactgagcctgcaggcccgccctggcggctttttgctgctgctcaaacttcacggcctgatcggccagctggttgagcttttgctggctggcaaccttatcgcccaggtcggccagctgccgcttgtactcgagcgtttcttctttgtgcgccagcagggatttttcctgcgccgtaagctgacgacgcccagcggcctcctgcagaacggtgaactgattttcagtttgccagagatcctgacgctgtttacttatgacgtcgttcacgctggtatgctgctcaagcgttttaagctgggcctgaagggtgagaagttcggcctgcgccttttcctcggctttgtccccggcgggcgttgagtagcttttgcctttcggtgtttttggatccttccactgcttttcaatcccggcgcgggccgcggcaatgtccttttcagtccacagcgtggcgacaccgtctttcgcatcctggcggtttttctcaataagctgactgagctttttctctgctgaagcccgcttttctgccgccgtcgcgccggactccaccagctggttaaactgctgctggctgcggattgcctgagcctgctggtccgttcgcattttttcccgcgcggctgccagcccttcctgggcgtattgctgatcggcaagatcgtaagcctgctttttcagctccacctgctggcgcgcgtttctcagcctttccgcatccgctttctgcagaacgttgttaccggcataatccgggtcgaccttaagattgctggacagcgcgcggtactctttctctgctgcctgccactcagcaaaagagtcctggcgcttcatcgcggtgtcaggattacgcccgacgcccagcatcgcatcccacgcaccggaggcggcattcttcacccagttccaggctttttcgagggatccgagattatcctcgaccgcaccggcgcgctgaatgaccgcgtcggaatatgcccgcatggccagctcggcagccttctgagaatcccccagcgcctgagcagaagctatctgttcatactgggtggctgtcagaaaatgaagggaatcgttgagcgtcgcgaccgcgttaaccggatcatccttcaggcgtttaaactgatttatggtttcgtcaacggcctgcccggtagcctgctgcagcctggcggcaacattgctgaccatgctgacgtcattaccgctgaacgcgccgctgccaacgacctgcgccagcacgcctgcagcggcatgctgagtgatgccattacctgccagcgagcgcgccagcgcctgcagctgccctgacgttttccccgcgtagttcccggtcaggatcagctgcctgttaaattcctcagactctttgctgccgtcgtaccaggccttacccaacccgaataccgccgcggcaatccctccgaccatgctggcgatcccaagaccgcgcagtgacagaagctggtctatccaccctgcccggttagccagcgtgatcccggagccgcgcagcgcgccgaagttaccgcgcatgacctcgccgatcagtattcccagttcctgccgggcggcggcactttgcagccccagaccgtgcgtggcgactttggcagcttcgagcttgcggatatagacttcagccgcatcgctggcaccgacctgcgccgccttcatgcgcagtagctcggtaccggagagcttttgctctgcaacctgttgcttcagctggctgaggaatcgcgtgcgcgctgcggccgatttttcctccacgatctgcagttctttttgacgggccgtggtgcgggaaataagggcgagataatcctgctgggttatgttgccctgtgccctcgctgcgcgaaagcgcgcctgcacgttcgcaagcgactgtgtttcaccattgagctggcgtacgccgtcgatctggcggaaaaatgatgccgcaagttcatcctgtcgacgggcaagcgcagcggcctgcccgtcattctcacgcatgcgctgattaagctcggtcacgcggcggtgagtttcatcaacggactttgaaacgttctgccagtctttggtaagcccttccgttgcggccgactggcgggatttcatatctgcggcagccgccgcgccagcgtcacccacggttttaaacgcagccgcctgccgctctgaagcgcgctgcattcgcgtctggactttttcagagtcctcagccatcccggttagctggccctttatgcgggcaacctgctcactaaacgtggcgctgtcgacgtcaaggttgatgaccagatcgctaatctgctgggccatatcggatacctcctgttatcccctcagctgcggccatcagcgcatcatcatccggctcgtcatcgctgatgacgataccggaaggagaaagcaggctgaaatgtgcgggggtaagttccgggtcgcggaagaaaagagtggagatggaataaagcagctctgagaaatgcgcatcgagctgagcgtcctgaaaataatgctcccggtagaactggtgccagtcgcccagctcagtggaagtcattccagccagcatggcgcgccagtcgggtcgcccgaactcgcgcgccagattcaggacaaacttcagctcgctggcaagggcttttccgccgcaacgggttctgcgctttcggcctccgctggggcatccggatcggcagctttgtcatcctcaaccggaacgagcatgccggagagcagctttatttccatttctgctttaccgatcgcctccggcggccagccgctaagcacctgctggtaaagcgtctccacatccgtgccagccggatcgttatgccacaaagacatcgcaatcaaacgcgcaccgcagcgaatatttgagccaatcagcctggccgtcatttcctgatcgctgatgccgtcgctgtcagcgctgacggccttttcctctgcggccataaacgtgatgtactcaatacgctgaagcgccgacagctcgaagatggtcagtgattctttttgccaggtgaacttctcttttttcagaaacatgcgtccttccttacgctgcagttacggtaactttgcagaccgcaacgaaattaccgtcgctggtcataacaataacgtcagcggtgcctgccgccacgccggtgacggtgatcgcattaccgctaacggtgaccgttgcttttgccccgtctgaggttgccacacggaacgaggtatctgaggcactggctgggttaaccgtcacattgagcgttgtggttgcgccgacggccacgcttgccgtggctttatcgagcgtaacgcctgtcacggggatattcggggtcccgctttcttctgccagttccggcttgccggtattggtaattttcgctgtacgggttatgacctcttttgccggaatggctttacccaggctgctgcaccagccgcggaaaacgtcgacggtaccgttcgggtatttgattttgtaatagcgtactgagccatcaataaaccatgcgacaaggtctttttgcccttcttcgcccggcttccaggcgagggtgaacgaggtatcgccagcagattttgccccctgggccgtcgcgttccagtcggcatcctcgtcgtcgaggtaagtgtcgtcatacgattcggcggtcatttcgcccggcgtcagctctttaattttcgccaggcggttccagtcgatatccgagagtgggttagcgaaagcgttgcccgttccggtgtaaagccagagggtggtaccggcacctttcacaggggccagcgggtttggagtaggcataagtacctcttaaattgaataggtgattaagtacgtgaaatcgactgaaccccaggtggccatttcatcatcccgctgatagtcataaccctgcggggtgaacgtctcgaccagttcggtcagacctgggatgaaggccattgccggatacactttctcttccatccaggaatcaagcgcgctgtcggggctggaggctttaagaaatacctcgatgtgaacaaccgcctgccacgaatcttcgtcaagcgattacacgtcttgagcgattgtgtaggctggagctgcttcgaagttcctatactttctagagaataggaacttcggaataggaactaaggaggatattcatatggaccatggctaattcccatgtcagtccagtgattctgaataggcgataagtccggtataaccggggataatctcaccattatcagcttcaaattcaggaattgtgccggtggtgatggtgtattgaggctggccatcttccttcgcgaaggctgccaggtcttcaatctgcttagctgtaagaactactgtcatgctcattcctcagttgtaaaaaagccccgcgagtgcgaggcgatttgattgaattctcggctcttatctcagcgcagccccttactgcgtgccggttgctcggtgatgagcatcagcgatgagacattaaagccgaccgaaggccagcggcgttcctcatgttgccgacagagccatatcgacaagaggacgaaaactagcagcatgaatcgcctattggttattcgacagtcgcactgattcgtaaatccgctcacacgtcattcctgcccggtagctttcgtcagatcgtccagcataatatcgagctgcttctgcaaggcttccgagcatgtcggcaagcattgctgcgttggctccggctgttttgcttctgacggaagtggcgagatctgcggtgtgctttgcggcgtccatgtgggtagcgagttttgttgcttcggcgcgcagctgcttaacagtggtagccaggccagcagaagtaacggcagcgctcgctgcttgagcttgagcatctttaacggcctcatcccgggcgattgttcgcccttgttcaatcatacgagctgcggtctgtgcattcgcttcctgtgaagattccgcgctatcccggtcagcccactttattttccagctgcggttcgtccactcactgccagcgagaaacgaacctaccaacgcaacaatcacaatgatgcagatgccacccggcttcactggtctatcccccagcacgtcagtgcgctttcctggtcccgccgttctacctgcccataacatccatccttctggcccttggtcaggcggcaatcgcggccaccgtctttaatccaccagcggatagcttcacaggctcctttcgtatcgccagcattaattcgcttatagaacgtagacgggaaacattttccggggccgatgttatatgggcagaaagaagcgatacccgctttctgtggttcggtcagtggtactttgatatttcggtcaacccacgccagcgccttgtcgcgttcaatggcgtttacctgggcgcatttctcagctgacagcttcatgccctgtactactggcttgccatcaaccattgttgcaccacggcaaatggtccagagtccgccgccgtcgcgatatgctgtcaagctgttaccctctttctcatccagaaactgatcgagaatcacgggtgcggaagccccggcaagaatcaaaccaacgaccgctgcgctcaatttattcttcagctttagagacatagccattgcgccgatcctcccgttctttccagcggaaataccagttcactgcacaggtgattaccgtgcatgcgataccgacaataattgcccagtcgctcaggcttaaccctgcaattctgtcggccaacatccaggacacctcttttgctgttttagctgtttcggcatatgccttcgctgatacaccgcagccggcaagcgtggttcctgatccatatgaaagtctgctgtaaatggtgctcattctggtcatagcctcacctccgatagttcggatggcgctgtgtgtgattgaaggggatcaggcaaccgggctcttatgttcaagtaaaaattaaggatgattcccggtgcctgaagatggtgatcaccacagcaacgggggagcgtggtgatcgttatgattttttcagtttttccacctcttcggtggtctgtataaacctgtctgcctccagttctacgccgatcgcccgacggccaagttctattgcagctttcacagttgaaccagagcccataaagaaatcggcaacgatatcccccggtctgctgctggcgctaatgatctgtttcagcatgtcggcaggtttttcgcatggatgtttgcctggataaaactgaacaggcttatgtgtccatacgtcggtataaggaacaagagcggaaacagagaagcagcgccgaaggattttgtattcctccagcaattctgaatacttgcggtttaatgactggtaggtagccaccagctggtggtgaggatgttcaagcttttgctgaatatgtttatcgatggcgatccgcgtgaacagttcctgcaattttcgatagtccacttcattcggtagttgccattggcttgcaccaaaccagtgtgacgccatgtttttctttccggttgcctcagctatttctttcgagctgacacccagtgattcacgggcattacggaagtaatcaatcagcggcgtcataatgtgctgctttagctctgtgcttttcctttcgtaaacatcctctttacctgtatacggtccaagatagtgctcagcaaacaaaatccgttccgtagatggaaagtacgcacgcaggctttctttattacatccattccagcggcccgatggttttgcccaaatgatgtgattcaaaacgttgaatcgggcgcgcatcataatctctatatctgaggccagtcggtgaccgcaaaacaggtagatgctgccagcaggtttaagaacgcgagcatactcagccaggcagctatcaagccagcgtaagtagtcctcgtcccccttccattggttgtcccagccgttgggcttcactttgaagtacggaggatccgtaactataagatcaatagagttatccgggagggtggcgacgtaatgcagactatcagcgttgattaactcaacactgtttatttttacagtatttttcatagatcagtaagcgtaactctgataggctcacgttgcttttgcgctaaagcagtgggccttggttagcttgtgacctgaaagcatgagctgatggctggccgggtgcgctaacacccaccagccgcccatttccacagcagaaaacccccattactggaggcgtttataacatccgaactggtaatcagataaccccgccatcaccagctgcgtaagtatgagctggcaacgttcgtggctgaggtgggtattctgtgcaatctccccagccgttgctggtttatcgcttaattcattgaaaacagcctttgccgtttctgtcatatcttcctgatttagcatgtcttttacctaaaattagttgcgtgacatacagataactctggttggtgataccagcaagagaagaatttgattctgcaaccaacaaggcctttaggcatcaggcaggaatgagatgcaataaaaaaaccacccgaaggtggtcttatatgaatctttaacgcggacttagcaaatattccacatcatcgtactaccgttatggttttcgataatttttgcggctgggctagtaccaaaagagtgcatatagcaatgatgaatagtaaggaccagatcctgcaacgtttggtcactctctagctccatgatatttaaaccaatattttgagctttgtccaaatgaatatgtctggcatgtgcatacgttgcttggtggttgtttaactcatcacatatacgcttagccttagcttcagcgtcagcctgacctgcgaacataccagtacaaagccatttctggacaatttcgttcgcccagagaattgctttttcacactcgccaatcaacgttggatttagtttttggaacgtaaattgccaccattgcagtgcagcagggttggcaaaaatttccgcttttgctctctcatactcctcaataattgcatgagatgataacccattaaactgtggatcaattggccccaagttcgactgtttacctaaaacgatctgctcagcacaacaagcaagcattgtgccacaactcattgaaatcataggtacaatcgctcggatattggttccgaactttgaacgaagataatgaccaattgattctagagctgcgatatcgcctccaggagtatggagtaagatatccaatcccagactcgtatctaacccattgatagcagacataagaccatttttatcatcatctgacatctggatcagatgttgaaacccaggcccccctttttgaaggaagcctgagtaataagaaattacatttcggccagtatgtttcgataaatcacgtaagtacttgtggcgaacctcatccgctggtgtacgttgagcgatagtacccatctcacccaatacgtctatccaatttggcatgttatcaatttatcagtatgagtacagttggtgagattgctgaccgttctgctcagtagtatttggtgttactgtgctgtatgaatagagcacaccacttctcacattcagatcgttttgctgagcgagaacacgcatagcaaaatgctgtacggattcgcctttttgaaactcttggggttgtatgcccattttttcgtaaaattcagcagcgctcatgatatgtccctcgtttttttctacatctatgcaattccaggagccatcaacacaagatgtagtagttagcagtcgtcaaatacacgaaaagcctcaagatgaggcttaaaaagattctttttgataaagatttagccaaactatagcggtcaaaatgcagatttgacaagtataaaaagcacttaaagcctataaataggcagtttttgagaattaaagcatctttaatgaggttgaacaaaatgcagtcttgacgctgaacaggactttactggaacgtagagctaaatggttcgatttcatgaaccagttacaaaaaaacccgctcatcggcgggtttataaaactttggcaacatatcaaatatgcttcaaatatggcttattttgttgcattttgcaagcgtgtttgaaggagatggtgaaatttacttcacatttctgccactttgagggcttcttcttcctcatagtattcaagagccatggccaacgcagattcatcaagctgggtaaaagcggcctttaacccagcccagtgccctgaatagacacgcaaccatgtcgaacggtcaacgctaaccatgcgggccaacgctgcaccagcatagtctttataggtttcattatttctggttgcggcaatttcctgccctgccagccataccaggcctatcagtttctttactacgcgctcctgaagggagttatcacccaggcatttctgataagttttccagacgtattcacacatcatcacctggtgcttatagctaaggtcaaaaccgtagcagtaccgcaaccaggcctgctggtatccactaagcgcggacactgccctacgccacggcgcggactcaaattccgcatcttttatcggcggcattggcctgcggcggctgcgtgtttccagcacatacagtggcgcggaaagtgagttaacaaagcgtggccccttctctccttcgagttcgacgagatgaattccacggcgaggggtggcatttttgtctgctggtgggtgttcactgaaagcctcaagctgcccttttgttcccccagacaggtcaggtagcgcgcggcgcaattctattcttacaaaattcaggtcttgttgattcatgcttctttgcgctccatacacttaagctttcgcaattacgccgatcgccagcgcccgatccataaaacgcagtagcagctcaagctgcgtaccatgcttctgctcgaatgccggtacatcggcgtgtaactcgtcgtggcactctctgcacagagggatcacgaagagatcatgggcttttgttgctgtcccccccataccgtgccctacgatatggtgcggatcatctgctggccgtcggcaacactcacagggttgtgttttaacccagcgggtgtacgtctcatttatccagcggcgtcgctttggcctgagcatgaaagattctggagactccggatcaacagagagcgtgaggatcttcttcgccttctcctgcacgaggctggttgcagaagcggaaggcacaatgtcgctttccctcatgaccgagcggatcttatcatccggaaggcgtagccccttgtgcgcaacgctttccggaataacatcagccaggtcgtttctgaccatccaccagcacagttccggaagcgtcaggatatgcgactcgggaaaaccagaatcacgccgaatgacttccagaatccaggataccaggtttcctgccgctatacctgcaagctgttcggtatgctgccccgacaaagtgtgatcgcaatgccagcacaggcgaatacttcctggtgggtgccgcattgttgtgaagttcttgtcgtgccacgatgaatgtggccactggcattcaaaccgattactcaaccattgctcaagggaaggaagcccaccagcacgctgaataacccgatcattctcgaagacctgccgcattaccggatcatcagccagcggctgaatggcggcgggaacagctcctgtactgaatgacgccatttcttctggttcaggctcaagcagaacgcgaccgcgcataaagaggtgcatcagttccgcgccgggacgaaacaacacaatccccatacgatgggcgatctcgggggtaagcagagctctcacgcgacctgccccctggcaatgtgttctgcccacagtccaccaatccagcgcacgcctttcgccgtgaaacgtgcctggctgaatgcatgatttgaggttacggatgtgccggttttcacttcaaaacggcccgcatcaatatgctgatgccgtggggtcatcgttccgccaagacgatacatgatgtcgttctcaaggaggaataaccgcagatcgggctctttggccttaagcagttttgccacctggcggaatgacattgacccactggctgtacagtaccgatcaacaaacgctaccttcggcgccgcggcagccagttcgttagtcaactgctgtttttgttctgcaaggtcagctgcaagacgtagggcttcagagaatgattgaggaatcgtctgctgctgtgcctgctcaagctcctgccagcgatcaaccagacgcgcggtaaactccggcgacagctgcgcgacaacgatataactgtcccgcttccctatcagataaaccgataccgactgattgaggtgatttttaacttcccccattggggggagttcaataacaccgcgctctgccaggcgttcaatggaccgtttaacatggtcatgtcttgattccaccagctcagcaatatcgctgctggacatggttaacgctgttgttgctaactggctcatacttttctccatatcaggcggctgcacccgccggttcatatctgctgattgttatctctacccgacctttcggcacaacgggtccccattccaccagcatgcgcttaatctggctgtcgtcttcccagacacccgcatgcgtcagcgcgtcaaacagggctttgttgtaattatcgatatcccggcggcgcgcatccggcgggtacagagtgatttctaccgctgccagttcagtcgatggcttcgggagacgtcgtaattgctcaatgatcgccacgcaggcagcgctctggtatttacggccagcggcgctaatgaggtgacgaccggccagcggccccttgttaggggcgcgccagtaagtgttcacgctcggaggaaaaggcaggatcagtttcacgcggcctctccccgcatattgcgaacaagttcagaagcagcagtaatgatttcgctggtggcagtccgctccagccagagttgattgatattggctttcagcttgtgttgcagtgactcatccagcatgtcagcaccatccacctggtcgaatacaattctaacctccagcggccagatacgggactcgggaagcggatccgatactggtttagctttctcacgaatgtgcatgcggatctggcgaatattggaccaactggaaacatccaggcttcccatggctgcaatgaagtcagtgctgttcatgccatattcaccggatgcttcaagggcaacagtgcgaatacgttccgacatatccaggcgcacagcagcgtcatcgaattcaatcgacaacagccactcatccacaccgaacaaaatactctcacgaataagcagcttcgctttgtcgatcgttaaaggtgatacctgagtgaattccggtgcttcgacagaatccgccgcccaggtatgcccaaacttcgattcactgaatgtgtattcttctttatcgccaaacgcagctctaacgcatgcccacgcctcgacaccgctgatagcaaaaatatctttctgggtgagtggcaactctgcttctggcttatcagctgcaggaggtgtggcagttacaggttgagacttgctggcagcaaattgtgccaaagccataaacgcccgcccttttgcctccagttctgtgcggttgatatagctgaaccgctcgccacgccatgacttatcgaatacagctatggcaccggcaaaaaacgcgctggtgggtttctgtttttcgtcagcaggtacaaaccacacaggcagatcgaacccaatgcgcccgcgaatgaatacaatgtgatcggcatcttccggccaccacgtttcactcggcgcggcttttatcaggaatacatagcgaccgcccttctcgcgctgggctgctgcgtagttcatgatgtgcgtcatgccggtgatcgcctgcttctcgtggtactgcgaacggctatacggtgggttgccatagccagcgccacccagttcagccagacgttcagaccagtcctgcgtcagcgcgttatcttcggcggtgtaccatgccgggcatttcgcgttgtcgtcgtcagcaaacaaatccagaactaatggaccaaatagcgcgttgatcccccaaaaaagcagatccggtgtccgccactgatcgccaacctctttcaattcgtgagctggtttgctacgcagtgccgccagcgcctggcaatatttattggtcatcatgaacggaaccccgaattttctggcagtgagtaatcaacactctggaagtttgcgcggctggctgagttagtctcccatttgccgttaacgcgttcaggccggccagcactggaccatttggtcgcgctttgcaggtaaccagggaagttttttggaatgaacagagttgccgggcggaggtattgcgcctgctcgctatcacgccaatcggcatttttgtaatccactaccaagcacaggtcatcaacagtgaattgttcccgaagacgggcgcgaatattctccagcgacgtgctgcatacctggtagcgtgagccagtagtctgattcaggtaagacaaaacctgtctggcctgatcagtaatcacaacctcagggtcgggttgcgccgcaaccggacaagagggttttgaagttacttgtggttcttgttttgattttactgacggatccccaccagattctgacgggtcaaaaccgccttttttgctggatttcgacgcctcaaattttgacgggtcggattttgatgcatcagattttgatgggtcagattttgatgcgtcagattctgacaggtgagaaaaagcagcctctcgcaacttaacgacgttaagctgatatacgttcgatgcgttacggttcccattacggcgctgcttacgggaaagccagccatccttctcaagctgagcaagggccgtccttaccgtactttctccagcaccgatttgacgtgcgatcgtgccaatagacggccagctaacaccctcatcactactgaagtcggccagacgcgccatgatggcaacgctggataacttcatgcctgacgaagcgcatgcatcccatacgtaaccggttaatttagtgctcatggtcgtcctttaattctgtaaatttacgctggaattgttcaagagggctgaagcactcatgatcgtacccttcgcgaaggtatataacgcgctgtgtatctggctcccagcggacaactctgacgggaactccgtagtgatctctgaaccgccggttaacttcagccattcctcgcgccccttctcgttcatctgaacaaatgcttctaccatcaagtctgctggctggtagttgcctccatcagccgcgttatttatgatttccacatagccgaactgggcatctttacccaccagcggcaaacatctgaattgcttagctggtctgaatcggtttacactgttcatgcgttagtttctccactgatacgacacgccaaggcgcccggagctgcacactcgcgggcgtcaccttttctgcctgttgaaacgaatacgtcaatcgcctgatctgaaacaccaaccccataaagcgccataaatcccaggaacccgtgaatctggtggcggagcttcttactgaataattctgaaagcattttgcgctctgatgaatcaattaccccatcagccgctgctgccatcttggcattagccagctcaccagatgctgctgccgctttcatctcaatgctgtacagctcaacgttatccaggctctcagcagttggaacatccaccagccatttcccttttcggttcgcctggtactcggccaagtaacaagaaccagacaggtcctccatccgttccagttctgccaaggtaaagaaccgactgccacacttctggtacaggtggttgtggaactggtcgatagtcatccctaaatcggaagccatacctaagcgaccatgcttgtgtgccttacacatcaggcggattgctgtatttatgctgtctaccatgttgatttccctctggtagttaataatcaacttaaagttgactattgttgttagcggaaggtatgccgtcatttttgttcggataaatatcaggtcgtaattgatggggagttactacccatccgccccattggcagagttgaataactctttcagaaggtactcggttctttgcaatccagttcgcaacagattgaactgattggaattcaaaccgccttgatacctctgaaatcgacccgatcgccttcacagctttagctgttacattcttgtgttgagatgacatgtgttctcctatgactaagcctgcatcaatactacttatagtagcaattattagcaacttaaaatagaaatgacaactatgccttgtgcgcttaatcttctacttatggtggaaaatgctaaatacaaagactttgccgaaaggctaaacaggtctctccaagagcaatctattggagttaaagaattgtcagagttcagtggtgtctcgtatgagatggcgcggcgctacactcttggtactgcaaagccgagagatgagaagatgattcgaattgcagaaagacttgccgtctcaccggcttatcttgattatggtgtgcctgttaatggtggcgacgcgccagccaaaggcacggtcagaatagagcaattggatgttcatgcttcagccggttccggatatataaaccaaccattccctacaatagtgagctcaatagagattccagaagagaggatcttcgagttgtttggtcgtagaagccttgatggcatcgtcatgataaatgttgatggcgatagcatgatgcccacgctttgcccaaaggacctgcttttcatagacagcaaggttgaacaattcagcggcgacggcgtttatgtgttcaattttgaagacagtacgttcgttaaacgtttgcagaaggtaaaagggcgccgactggcagttctttcagacaatgaacattacccgcccttcttcatagaggagcatgaaatgaatgaactatacatattcggcaagctaatcagatgcttacctctaaaaatgatagagtttggctaataattaattcatcaagaaaccggcgaaagccggttttttttacgcctccaattcctcacctcataacactacactactaaaaatttcattttctactttttgttgttgcaattatctacttaaagtagctatagtcattgcatcgaaagcgaacaggcaggacgcccacgaagtagccgccggtggcatatgaataaccggatgattcgctgacagaaaacttaggttgggggtagaggtttacatgaatcatttattcacatgctcattttgcggagcaaccgaactgggagcgataaagatcgtcgcaaaaggtggtaaggacgaacctgccatctgttcggaatgcgtagtcacatgtgtagaaaaaatgatcctgactaaaaaatcagaggctgaaaaaccaacctctgataacgaaataatatcagtcgataaaaaactatttaaagagcttcttcagcttgtcctcaaccttcctgatttcggaagtaagctggctgctgttgacattgatagtagctccacatcgacaagtgaaacttttgttcgacttgagccaagcgattttcttcttcgtcttagtgccgcacttagggcatgcgggtaacgtaatttcctggttatcaaaagcgcccataaacatccctcttggttgtgtgagaacaccaagataccaccgcgcctgatgtggttaaaagcaggctaaagcaataacaagtaactccctgttctggcggcccggtgttttcccgtgtatttccggtaaccgccagcctttttcagggcacaacagaaaagggcatcaccgggcgacgggctcataacccaatccacccgggcaaaaagaaagcggtctctgcaagccgccgaccaatgcaggtgcccttctctgttgtgtatggagaaactaactttttagcgtctgtgcagatgcgctgaggaaccgagaatgaataatccgtttttcaaaaatatgttggtgtatcgcattagtcgcgatttcaccatcaaccaggaagagctggaacagcagcttgaactatttcgcttcactccatgcggtagccaggatatggcaaaaaccggttgggtatcaccacttggtcagctgtcagatcgcttgcatcacactgtcaataatcaagtgttgttggttattcgccgggaagaaaaaatactgccatctcctgtcattactgaagaactgcgcaagcgtgtgtcgcgtctagaatccgatcaggggcgtcgcctcaaaaaaactgagaaagattcgctgcgtgatgaagtgttgcactccctgcttcctcgggcgttctccaaaaactcgactgttggtttgtggatcaacgtcaccgacggtctgatcatggttgatgcagccagcgctaaacgtgccgaagactcactggccctgcttcgtaaaactctcggttctctcccggtggtaccgctgactatggaaacgccgatcgaactaactatgaccgactgggttcgttccggtagtgcgcctgctggctttggcctgggtgatgaagccgaactgaaagctattcttgaagatggcggtattggacgctttaaaaaacagactctggtcagtgacgaaattcatgtgcatctggaagctggcaaagtagttacaaagctgtctatcgactggcaacagcgcattcagttcgttctttgcgatgacggcagcatcaaacgccttaagttctctaatgagattacagaacaaaacgacgatatcgaccgtgaggatgcggctcagcggttcgacgctgactttgttctgatgaccggcgagcttatctctctcattaacggattaacaacctctctcggcggcgaagccaagcgataaacaccaggcaacaattacccccataagcatgggttgggttgctgcacgctaaattcagcaattcattaatttaatggcgcggtgcagcgcgccaatatggagaaaaccatgagctacattcagacattatccggcaaacattttaattacctcgatatccaacaggacgatatcgtgatcgaggatattgctaccgcgttgtctcatatctgccgctttgcagggcatcttcctgagttttacagtgtcggccagcatagcgttttaaccagccacctcgttccgcaggagtttgcattagaagcactgcttcatgatgctgctgaagcctacctgcaggacatcccctccccacttaagcgcctgcttccggattaccaggcaatcgaagctcgtgtggacgcagccattcggcagaagttcggtctaccaactgagcaacacccaaccgtgaaatatgccgacctggtgatgctcgccagcgaacgccgcgattttgagattgacgaaggttccatttggccatgcctcgagggagttgtcccaacggatttattcattatcaacccagttcgtcctggccagtcatacggcatgttcatcaatcgctttaacgagttgatggagcagcgccaatgcgccgcatgaaggtaaaagaactcgtagcggaggcgtttgcctccgttgctgaattgccaccaaagcatgcgccgcttatgcgcgaagtcgccaccagactggacgctacgttcgcagcattaaaagagtctctggtgcaactggaacaggaacgtaaagataaaacgccatgaccgtatttgaatatctccaggctcatccgaataccaccagcggtgaaatcgccaaaggtatgaacaaaaagaccccagcggtcgccggagcattatctcagctctatggcaccggtcggatcgtgaagtctggtgttcgcaagggtattccaacataccgcattaacgatatgccgtttggttgcagtaacagcctaaccatgatgtttaaccagctcttgagcagagccagacaaggagcagcccaatgacagcactcaacaaacaggcgctgcgtgaagaattccagttcatgcaggacaactatagcgacccggcagaccacgatcggcaggtgatttacatcgaggcggaggcgctgctggatgagttggaagccaaagactcaacgatagcagcacaacaacatgagatccgtatgttgctgaatgcgcttgaggaaaaaccatgcccgaaatgcaacgacacaggaatgactgatagtggcggcacgcagccatggggcgagccgattgagattgaatgcgactgccgacagcaggatgccaacaccgcagaacttgtagccgctggcattggcgtgaagggggagtgagatggataaattaatcaaacctaccgccaaaggtaaatatgacggttcatgtgattatctttgctcggaagatgcgcgattcatcgttatgcgcggcgattatacggaagcggaaataattcaggcttctgtgtctcaagatgtaatcgactcggatggtgcggctgattttgcaagtagcgcccgctattatcagtgctggtacaaagttagcccaataggtggtcaggatggctattcaggctggcatcatcctcgtgattcgccgtgtcgcggtgcatatttcgcatcagttttgcaatgggattaaggaggactaacccatgacaactaacaaccacccggcgcacggtcctgtatcactcgatcgcctgcaccagatacgcgaacacctgctgcatgatacccaatactcaaacggcgggaacagagcctacattctcgctgatgtattgaaggtgattgatggggctattgcccgcgagctggtacgccgtgagcatgcagcgtggtcacaggctactttcggcgatgtcggtccagttggtccgctgaagcacctttccaaagaagcgctcgaggctgctgctgaaccaggcgaccttagcgaatgggctgacatgcaattcctgttatgggatgcgcaacgtcgtgccggtatcagtgatgagcagattacccaggcaatgataaaaaagctggctataaataaggttcgccaatggcctgagccgaaagacggggaacctcgattgcatatcaaagaacagtcagagcaggagaaaaaataagaatgtttagcctgattcggcgcggtcaaatctacacggacagtagcaactggcccgtaattatccatagctgtagtgatcactcggtccgaattaaacgcaatgatggcgagctgagaacgattagcatcaaacgctttaacgaagattttgaacgagtggagcatgatgagtatcgcaaaatatgtgccgaaatagagcaggaaacaaacctgaaaaacctacgtgcgatgcgtcgcggcaagattactgaatagccaaacaggagaatatttaacgtgaacaacttaatgatcgaccttgagtccatgggcaaaaaaccgaatgcccctattgtctccattggtgccgtattcttcgatccgcaaagcggtgaactgggtcaggagttttacaccgctgttaatcttgaaagcgctatggagcagggagcggtgccggatggtgacactattctgtggtggttaagacaaagctcagaagcacgatcagcaatctgtgttgatgatgcgatgccgatatcatctgccctatctgaactgagccatttcattaatcggcattctgataaccctaaatatttaaaagtttggggcaatggagctactttcgacaacgttatattgcgcggcgcatatgagcgtgccggccaggtttgcccgtggcaattttggaatgatcacgacgtcagaaccatcgtcacattaggcagatctgtaggtttcgatcctaagcgtgatatgccatttgatggggttgcacataacgcactggctgatgcccgccaccaggcgaaatatgtttcagcgatttggcagaaactaatcccaaccaccagcaacagctaaagttttccccgggtgcagccgggataatggagaaataactatgagcaatattttccagttagctcccaacgattgggtttgtgaaagcgttttgatcgcggttactgggctcaaacccggaaccatcctccgtgccagaaaagaatgctggatgattgggagggagtatatccacgtatcgcctgacggaaatcctaaaccttccagtgagtgcatgtataacagaaaggctgtagatgcctgggtcgcttcaatgaaaagcaagcaaccagggtgatttgatgccatgaaaaaggtaagctcgtatcgctcttgggcgtctggaggtaacaccaatggataaagtcacatatccaacaggcgtcgaaaaccacggtggcacattacgcatctggtttaattttaaaggtaagcgtgtcagggaaagtctcggtgtccctgacaccgctaagaacaggaagatagccggggaactgcggacatcagtatgttttgccatccgcacaggaacctttgattatgcaacccagtttcctgactcccctaacctcaaggcttttggtgtaagtaaaaaagacattacagtgaaagaacttgaagaaaaatggctggatctgaaacggatggaaatctgcgcgaacgcatttaatcgctatgaatctgtcgcaaggaatatggtgccgaggatcggaggtaatcgcctggtgtcagcagtaaccaaagaggaattgctgtatctgaggaaatatttgctaactggttatcagaatccgacgaaaaacaaagccccggcaaaagggcgaagcgttgttactgtgaactattacatgacgacaatggccggaatgtttcagtttgctgcggatcacggttacttagaggtgaacccattcgagggaattaagcctctgaaaaaagccagggcagaaccagatcctctgtctcgtgatgaatttattcgcctgatagatgcatgccggcatcagcagacgaaaaacctgtggtcattagcagtgtacacaggaatgcgtcacggggaactggtctccctggcctgggaagatatcgacctgaaggctggaacaattaccgtcagacgtaattatacgaaacttggtgagttcactctaccgaaaaccgaggcaagcacagatcgagtggtgcatcttatccagcccgcaatcagtatcctgaaaaatcaggctgaaatgacaaggctgggcaggcaatatcacattgaagtgcagttacgtgagtacggccgttcggtgaaccatgagtgtacattcgtctttaatccgcatgtggtcagacgcagtaagcaggtcggatttatctaccgggtcgattcagtaggcgactcatgggaagcggcacttaagcgtgcggggatcagacacagaaaggcgtaccagtcacgacacacctatgcgtgctggtcattatcagctggtgcaaaccctagttttattgccagtcagatggggcatgcgagcgcgcagatggtgttcaatgtttacggtgcatggatggctgacagcagcgcagagcagatcgcaatgctgaatcagaagctggcagattttgccccattgatgccccatagccacgagaacagtacgggaggattattaaaatcagtaagttaacccctaacgcccgtcatgttaactgtgtggagggtaacaccacgctttatgccctgccgaaacccgaggttgtcctgcgctggcgtgagcagaccacagatgacttccgcttctgttttaagtttccggcgaccatttcgcatcaggcagcattacggcattgcgatgatttagtgactgaatttttgacccgcatgtcaccgttggctccgcgcattggacaatactggctgcaactgcctgccacattcggcccacgggagctgcctgcgctttggcattttctcgattctcttcccggtgaatttaattatggggtggaagtccgccatccacagtttttcgccaaaggggaagaggaacaaacgcttaatcgcggtttacatcagcgcggcgttaatcgggtgattttagacagccgcccggttcatgcagcacgtccatacagtgaagctattcgcgacgctcaacgaaaaaaacctaaagttccggtacatgctgtactgacggcgaaaaatccactgatccgttttatcggtagtgatgatatgacgcaaaaccgggaattatttcaggtctggttacaaaaattagcgcagtggcatcagaccactacgccttatctttttttacatacgccagatattgcccaggccccggaactggtacataccctgtgggaagacttacgtaaaacgcttccagagatcggagcagttccggctattccacagcaatcttctcttttctgaatttgccacctatcatagacaggtgccatcggccattttaaagggagtttgtatggtaagcgcgctgtatgccgttttaagtgcgttgttattaatgaagttctcttttgatgtcgttcgcctgcgaatgcagtaccgcgttgcctatggcgacggcggttttagcgaactgcaaagcgctattcgcattcatggtaacgcggtggaatatattcctatcgcgattgtgttgatgctgtttatggaaatgaatggcgcagaaacctggatggtgcatatttgcggcatcgttttgcttgctggtcgtctgatgcattattacggttttcatcaccgtctgttccgctggcgacgttctggcatgagcgccacctggtgtgcgctgttgctgatggtgctggcgaatctttggtatatgccctgggagttggttttctccctgcgttagcgcacaatacgccactttctttttcccggatttttacgttatgtctcaccgcgacacgctattttctgcccctatcgccagactgggcgactggacctttgatgaacgggtagctgaagtcttcccggatatgatccagcgttccgttcccggctattccaatattatttccatgattggtatgttagccgagcgcttcgttcaacctggtacgcaggtttacgatctgggttgttctctgggcgcggcgacgctctcggtgcgtcgcaacattcatcatgataattgcaaaattattgccatcgacaactccccggcgatgattgaacgctgccgtcgtcatattgacgcctataaagcccctacgccagtagacgttattgaaggtgatattcgcgatatcgccattgaaaacgcatcgatggtggtgctgaattttaccctgcaattcctggaaccttccgagcgccaggcgttactggataaaatttatcaagggctgaacccgggcggtgcgctggtgctttcggaaaaattcagtttcgaagatgccaaagttggtgaactgctgttcaacatgcaccacgactttaaacgtgccaacggttacagcgaactggagatcagccagaaacgcagcatgctggaaaacgtgatgctgaccgattccgtggaaacccataaagcacgcctgcataaagccggttttgagcatagcgagctgtggttccagtgctttaactttggttcactggtggcattaaaagcagaggacgctgcatgatcgactttggtaacttttattctctgattgccaaaaatcatctttcacactggctcgaaacgctgcccgcgcagattgctaactggcagcgcgagcagcagcacgggctgtttaagcagtggtccaacgcggtggaatttctgcctgaaattaaaccgtatcgtctggatttattgcatagcgtaaccgccgaaagcgaagagccactgagcgccgggcaaattaagcgcattgaaacgctgatgcgcaacctgatgccgtggcgcaaagggccgttctcactgtatggcgtcaacatcgataccgaatggcgttccgactggaaatgggatcgcgttatgccccatctttctgatttaaccgggcgcaccattcttgatgtcggctgtggcagcggttatcacatgtggcgcatgattggcgcaggggcgcatctggcggtgggtatcgatcccacgcagctattcctctgccagtttgaagcagtgcgtaaactgctgggtaacgatcagcgcgcacatttgttaccgttaggtattgaacaacttccggcactgaaagcctttgataccgtcttttcgatgggcgtgctttatcatcgtcgttcaccgctggagcatctctggcagttaaaagaccaactggtgaatgaaggcgaactggtgctggaaacgctggttattgatggcgacgaaaacacggtgctggtgccgggcgatcgttacgctcaaatgcgtaatgtctatttcattccttccgcgctggcgctgaaaaactggctgaagaagtgtggttttgttgatattcgcattgcagatgtgagcgttaccaccacagaagagcagcgacgcaccgaatggatggtcaccgagtctctggccgattttctcgacccgcatgatccgggtaaaacggtggaaggttatcctgcgcctaaacgcgcggtgctgattgcgcgcaagccgtaaaggtctggtaatactgccggatgcggcgtgaacgccttatccggcctacaaagtcttgctaattcaatatattgcaggggctatgtaggcctgataagcatagcgcatcaggca

SEQ ID NO: 1434 - DNA, 79 bp, Artificial Sequence
  Description of Artificial Sequence: Synthetic primer
tggaggctttaagaaatacctcgatgtgaacaaccgcctgccacgaatcttcgtcaagcgattacacgtcttgagcgat

SEQ ID NO: 1435 - DNA, 79 bp, Artificial Sequence
  Description of Artificial Sequence: Synthetic primer
gataatggtgagattatccccggttataccggacttatcgcctattcagaatcactggatctgacatgggaattagcca

SEQ ID NO: 1436 - DNA, 28 bp, Artificial Sequence
  Description of Artificial Sequence: Synthetic primer
gtgattaagtacgtgaaatcgactgaac

SEQ ID NO: 1437 - DNA, 20 bp, Artificial Sequence
  Description of Artificial Sequence: Synthetic primer
ctctgtcggcaacatgagga

SEQ ID NO: 1438 - DNA, 79 bp, Artificial Sequence; identical to SEQ ID NO: 1434
  Description of Artificial Sequence: Synthetic primer

SEQ ID NO: 1439 - DNA, 79 bp, Artificial Sequence; identical to SEQ ID NO: 1435
  Description of Artificial Sequence: Synthetic primer

SEQ ID NO: 1440 - DNA, 20 bp, Artificial Sequence
  Description of Artificial Sequence: Synthetic primer
tggaggctttaagaaatacc

SEQ ID NO: 1441 - DNA, 20 bp, Artificial Sequence
  Description of Artificial Sequence: Synthetic primer
gctggcgattcaggttcatc

SEQ ID NO: 1442 - DNA, 40 bp, Artificial Sequence
  Description of Artificial Sequence: Synthetic primer
gctggcgattcaggttcatcgttttcaccgtaacacgcca

SEQ ID NO: 1443 - DNA, 42 bp, Artificial Sequence
  Description of Artificial Sequence: Synthetic oligonucleotide
tcgacatttatcccttgcggcgaatacttacagccatagcaa

SEQ ID NO: 1444 - DNA, 49 bp, Artificial Sequence
  Description of Artificial Sequence: Synthetic oligonucleotide
ggcgcgccttgacaattaatcatccggctcctaggatgtgtggagggac

SEQ ID NO: 1445 - DNA, 50 bp, Artificial Sequence
  Description of Artificial Sequence: Synthetic oligonucleotide
ggcgcgccttgacatcaggaaaatttttctgtataatagattcatctcaa

SEQ ID NO: 1446 - DNA, 51 bp, Artificial Sequence
  Description of Artificial Sequence: Synthetic oligonucleotide
ggcgcgccttgacataaagtctaacctataggatacttacagccatacaag

SEQ ID NO: 1447 - DNA, 432 bp, Artificial Sequence
  Description of Artificial Sequence: Synthetic polynucleotide
aaagcaacaaaacttgtgttaggcgcggttatacttggctccaccctgcttgcaggttgctcgtctaacgcgaagatcgaccagggtatcaatccttacgtcgggtttgaaatgggatacgattggttgggacgtatgccttataagggaagtgttgaaaacggcgcttataaggcgcagggagtacagttaacggccaagcttgggtaccccataacagacgatttagatatttatacccgtttaggaggaatggtttggagagccgacacgaagtctaatgtatatggtaagaaccacgacacgggagtatcccccgtctttgcagggggagtggaatatgctatcacaccagagatcgctacccgtttggaatatcaatggacgaataatataggcgacgcccatacgataggaacgcggcccgacaac

SEQ ID NO: 1448 - DNA, 1974 bp, Artificial Sequence
  Description of Artificial Sequence: Synthetic polynucleotide
attacgcatggctgttatacccgtacgcgtcataaacacaagttgaagaaaactctgatcatgttatccgctggacttggactttttttttacgtgaatcagaactctttcgctaatggggaaaattattttaaactgggatcagacagcaaattacttacgcatgactcataccagaatcgtctgttttatacgctgaaaactggtgaaaccgttgcagatttaagtaaaagtcaggacattaacctgtcaactatttggtcacttaataaacacttatattcgagcgaatcggaaatgatgaaagctgcaccggggcaacaaatcatcttgcccctgaagaaattgccctttgaatactccgctttgcccttgctgggctcggctcctctggtagccgccggaggcgttgccggtcacactaataagctgacaaaaatgtcacccgacgtgacgaagagcaacatgacggatgataaggctttaaattacgcagctcagcaagcggcctcgttgggaagtcagttacagagtcgttcgttaaatggtgattatgctaaggataccgcattgggtattgccggcaaccaagcgtcgagccaacttcaggcatggttgcaacattacggcactgctgaagtaaatctgcaatcaggtaataattttgacggtagttccctggatttccttttacctttttacgattcagaaaagatgttggctttcggacaggtgggggcgcgttacatcgattcacgttttaccgctaacttgggggccggtcaacgcttcttcttacctgccaatatgttgggctataatgtatttatcgaccaggacttcagtggtgacaatacacgtctgggaattggtggagagtattggcgcgattactttaagtcatctgtaaatggctattttcgcatgagcggttggcatgaaagttacaacaagaaagactacgatgagcgccccgcgaacgggtttgacatccgttttaatggttatttgccatcttatcccgccttgggagctaaattaatctacgagcaatactatggagataacgtagctttgtttaatagcgacaagttacagtctaatccaggagcggctacagtgggagttaattataccccaatcccactggtcacaatgggaatcgattatcgccacgggactggtaatgaaaacgatttattatactccatgcagtttcgttatcagttcgataagagttggtcgcagcagattgagcctcaatatgttaacgaattacgtaccttgtccggcagtcgctacgatctggtacaacgcaataacaatatcatccttgagtataagaaacaggacattctgtctttgaacattccacatgatattaatggtaccgagcactcaacacaaaaaattcagctgattgtgaaatcaaagtatggactggaccgtatcgtgtgggatgatagcgctctgcgcagtcagggtggacagatccagcactcgggtagccagtctgcccaagactaccaggctatcctgccagcgtatgtccaagggggaagtaacatctacaaagttacagctcgcgcctatgaccgcaacggtaattctagtaataatgtgcagttgacaattacggtgctgtccaatgggcaggtcgtcgatcaggtaggtgtgacggattttacagccgataaaacctctgcgaaggcagataacgcggataccatcacatacactgccactgtaaaaaaaaacggtgtcgcgcaggcaaacgttcctgttagcttcaacatcgtgtcgggtacagccacccttggggccaactcggcaaagactgacgcgaatggcaaggctacagtcacgttgaaatcctcgacaccaggacaggtcgttgtgtctgccaagacagcagagatgacctccgcccttaatgcatctgctgttatcttcttcgatcaaacgaaggcatct

SEQ ID NO: 1449 - DNA, 915 bp, Artificial Sequence
  Description of Artificial Sequence: Synthetic polynucleotide
ccgcgtgctgcacaaccgcgtacacaagctgcagcccaggccgacgcagtatccacgaacacaaattcagcgttgagtgatgctatggcttcaactcaatcaattcttttggacaccggcgcatatttaactcgccatatcgcccaaaagtctcgtgcggatgcagaaaaaaatagcgtgtggatgtcgaatactgggtatgggcgcgactacgcctctgcgcagtaccgccgtttcagcagcaaacgcacccagactcaaatcgggatcgatcgtagtcttagtgagaatatgcagattggcggagttctgacttattccgactctcaacatacgttcgaccaggcagggggcaagaatacgtttgtacaggccaatctttacggaaagtactacttgaatgatgcctggtatgtcgctggggacattggcgcagggagcttgcgttcccgccttcaaacgcaacaaaaggcgaatttcaatcgcaccagcattcagactggccttacacttgggaatacacttaagattaatcaatttgagattgtgcccagtgctgggattcgttatagtcgtttatccagcgcagactataagttaggcgacgactctgtgaaagttagctcaatggccgtgaagacgttgacggctggtttggatttcgcctatcgctttaaagttggaaatctgaccgtgaagccgctgctttcggccgcttattttgcaaactacggcaagggcggcgttaatgtcggtggtaagagtttcgcctataaagctgacaatcagcagcaatattcggccggcgtcgcgttgttgtatcgcaacgtgactttaaatgtaaacggctccatcacaaagggcaagcagttggagaagcaaaagtcaggccaaatcaagattcaaatccgtttc

SEQ ID NO: 1450 - DNA, 696 bp, Artificial Sequence
  Description of Artificial Sequence: Synthetic polynucleotide
atgttaatcaatagaaacattgtcgccctttttgccctgccattcatggcgagtgcgaccgcttccgagttaagcataggggccggcgctgcgtataatgagagtccttaccgtggctataatgaaaacacaaaggcaatcccccttatctcgtatgaaggcgacaccttctatgtacgtcagactacattaggtttcatcttaagccagtccgagaaaaacgagttatcgctgacagcttcatggatgccattggaattcgacccgacagataatgatgattatgcgatgcagcagctggacaaacgggattcgacagctatggccggcgtggcttggtatcaccacgagcggtggggaactgtcaaagcttccgccgccgctgacgtgttagacaacagcaatggctgggtgggggaattaagcgtgttccataagatgcagataggtagattatcccttacaccggctttgggagtcctgtattatgatgagaacttttccgactattattatgggatttctgagtctgaaagtcgtcggagcggtcttgcgtcgtactcggcgcaagacgcgtgggtgccttatgtatctttgacagcgaagtatccaataggcgagcacgtggtattgatggcaagtgctggttattccgagttgcccgaagaaattactgacagtcctatgatagaccgt

SEQ ID NO: 1451 - DNA, 585 bp, Artificial Sequence
  Description of Artificial Sequence: Synthetic polynucleotide
cctaacatcacaaacctttgtccgtttggtgaagtcttcaatgctactcgcttcgccagtgtgtatgcctggaacaggaagcggatctcgaactgtgtagcagactacagcgtactgtacaacagtgcatccttctctaccttcaagtgttacggtgtctctcctacgaagttgaacgacttgtgcttcaccaacgtgtatgcagactccttcgtcatcagaggtgatgaagttcgtcagatcgctccaggtcagacaggcaagatcgcagactacaactacaagttgcctgatgacttcacaggatgtgtgatcgcttggaactccaacaacttggactccaaggttggtggcaactacaactacttgtaccgtttgttccgtaagagcaacctgaagccattcgaacgtgacatctcgactgagatctaccaagcaggtagtactccatgcaacggagtcgaaggattcaactgctacttccctttgcagagctacggattccaaccaacgaacggagtaggttaccaaccataccgtgtggtcgtgttgtcgttcgagttgctgcatgcacctgcaacggtc

SEQ ID NO: 1452 - DNA, 1209 bp, Artificial Sequence
  Description of Artificial Sequence: Synthetic polynucleotide
aaagcaacaaaacttgtgttaggcgcggttatacttggctccaccctgcttgcaggttgctcgtctaacgcgaagatcgaccagggtatcaatccttacgtcgggtttgaaatgggatacgattggttgggacgtatgccttataagggaagtgttgaaaacggcgcttataaggcgcagggagtacagttaacggccaagcttgggtaccccataacagacgatttagatatttatacccgtttaggaggaatggtttggagagccgacacgaagtctaatgtatatggtaagaaccacgacacgggagtatcccccgtctttgcagggggagtggaatatgctatcacaccagagatcgctacccgtttggaatatcaatggacgaataatataggcgacgcccatacgataggaacgcggcccgacaacggcatccctggggtcgactataaggatgacgacgacaagcaattgacggcattgacggaaggtgcaaaactgtttgagaaagagatcccgtatatcaccgaactggaaggcgacgtcgaaggtatgaaatttatcattaaaggcgagggtaccggtgacgcgaccacgggtaccattaaagcgaaatacatctgcactacgggcgacctgccggtcccgtgggcaaccctggtgagcaccctgagctacggtgttcagtgtttcgccaagtacccgagccacatcaaggatttctttaagagcgccatgccggaaggttatacccaagagcgtaccatcagcttcgaaggcgacggcgtgtacaagacgcgtgctatggttacctacgaacgcggttctatctacaatcgtgtcacgctgactggtgagaactttaagaaagacggtcacattctgcgtaagaacgttgcattccaatgcccgccaagcattctgtatattctgcctgacaccgttaacaatggcatccgcgttgagttcaaccaggcgtacgatattgaaggtgtgaccgaaaaactggttaccaaatgcagccaaatgaatcgtccgttggcgggctccgcggcagtgcatatcccgcgttatcatcacattacctaccacaccaaactgagcaaagaccgcgacgagcgccgtgatcacatgtgtctggtagaggtcgtgaaagcggttgatctggacacgtatcagggatccggccaccaccatcatcaccac

SEQ ID NO: 1453 - DNA, 1284 bp, Artificial Sequence
  Description of Artificial Sequence: Synthetic polynucleotide
aaagcaacaaaacttgtgttaggcgcggttatacttggctccaccctgcttgcaggttgctcgtctaacgcgaagatcgaccagggtatcaatccttacgtcgggtttgaaatgggatacgattggttgggacgtatgccttataagggaagtgttgaaaacggcgcttataaggcgcagggagtacagttaacggccaagcttgggtaccccataacagacgatttagatatttatacccgtttaggaggaatggtttggagagccgacacgaagtctaatgtatatggtaagaaccacgacacgggagtatcccccgtctttgcagggggagtggaatatgctatcacaccagagatcgctacccgtttggaatatcaatggacgaataatataggcgacgcccatacgataggaacgcggcccgacaacggcatccctggggtcgactataaggatgacgacgacaagcaattggaggtgcaattacaacagtcgggaccagagttggtcaaaccaggagcatcagtccgtatgtcgtgtaagagtagcggatatatttttactgacttctacatgaattgggttcgtcaaagccacgggaagtctctggattacataggctacatttccccttacagcggtgtaacaggctataatcaaaaattcaaaggtaaggctacactgacggtggacaagagcagcagtacagcgtacatggaattgagatctttgacctctgaagattcagcggtatactattgcgccgggtcttccggcaacaagtgggcgatggactattggggtcacggagcttctgttacggtaagttccggtggtggaggctctgggggcggaggttcgggtggagggggttccgacattgtcttgacccagagcccagcgtcacttgctgtctcacttggtcagagagcaaccatctcctgccgctcttcacaatccttagtccattccaatggtaacacgtatttgaattggtatcagcaaaagccagggcaaccgcctaagttgcttatctataaagtatccaatcggttctccggtgttccggctagattttcagggtccggtagcgaaagtgactttacgcttacgatcgaccctgtggaggaggacgatgccgcaatctattactgtagtcaaacgacccacgttccccctacctttggaagtgggacaaaactggagctgaaacgggcaagccagccagaacttgccccagaagatccggaggatggatccggccaccaccatcatcaccac

SEQ ID NO: 1454 - DNA, 2568 bp, Artificial Sequence
  Description of Artificial Sequence: Synthetic polynucleotide
attacgcatggctgttatacccgtacgcgtcataaacacaagttgaagaaaactctgatcatgttatccgctggacttggactttttttttacgtgaatcagaactctttcgctaatggggaaaattattttaaactgggatcagacagcaaattacttacgcatgactcataccagaatcgtctgttttatacgctgaaaactggtgaaaccgttgcagatttaagtaaaagtcaggacattaacctgtcaactatttggtcacttaataaacacttatattcgagcgaatcggaaatgatgaaagctgcaccggggcaacaaatcatcttgcccctgaagaaattgccctttgaatactccgctttgcccttgctgggctcggctcctctggtagccgccggaggcgttgccggtcacactaataagctgacaaaaatgtcacccgacgtgacgaagagcaacatgacggatgataaggctttaaattacgcagctcagcaagcggcctcgttgggaagtcagttacagagtcgttcgttaaatggtgattatgctaaggataccgcattgggtattgccggcaaccaagcgtcgagccaacttcaggcatggttgcaacattacggcactgctgaagtaaatctgcaatcaggtaataattttgacggtagttccctggatttccttttacctttttacgattcagaaaagatgttggctttcggacaggtgggggcgcgttacatcgattcacgttttaccgctaacttgggggccggtcaacgcttcttcttacctgccaatatgttgggctataatgtatttatcgaccaggacttcagtggtgacaatacacgtctgggaattggtggagagtattggcgcgattactttaagtcatctgtaaatggctattttcgcatgagcggttggcatgaaagttacaacaagaaagactacgatgagcgccccgcgaacgggtttgacatccgttttaatggttatttgccatcttatcccgccttgggagctaaattaatctacgagcaatactatggagataacgtagctttgtttaatagcgacaagttacagtctaatccaggagcggctacagtgggagttaattataccccaatcccactggtcacaatgggaatcgattatcgccacgggactggtaatgaaaacgatttattatactccatgcagtttcgttatcagttcgataagagttggtcgcagcagattgagcctcaatatgttaacgaattacgtaccttgtccggcagtcgctacgatctggtacaacgcaataacaatatcatccttgagtataagaaacaggacattctgtctttgaacattccacatgatattaatggtaccgagcactcaacacaaaaaattcagctgattgtgaaatcaaagtatggactggaccgtatcgtgtgggatgatagcgctctgcgcagtcagggtggacagatccagcactcgggtagccagtctgcccaagactaccaggctatcctgccagcgtatgtccaagggggaagtaacatctacaaagttacagctcgcgcctatgaccgcaacggtaattctagtaataatgtgcagttgacaattacggtgctgtccaatgggcaggtcgtcgatcaggtaggtgtgacggattttacagccgataaaacctctgcgaaggcagataacgcggataccatcacatacactgccactgtaaaaaaaaacggtgtcgcgcaggcaaacgttcctgttagcttcaacatcgtgtcgggtacagccacccttggggccaactcggcaaagactgacgcgaatggcaaggctacagtcacgttgaaatcctcgacaccaggacaggtcgttgtgtctgccaagacagcagagatgacctccgcccttaatgcatctgctgttatcttcttcgatcaaacgaaggcatctgtcgactataaggatgacgacgacaagagatctacggcattgacggaaggtgcagcacaagtgaagttggaagagtcaggtggtggtagcgttcagacgggtggtagcttacgtctgacctgtgcagctagtggtagaacatctcgtagttacggtatgggatggttccgtcaagctccaggcaaggaacgtgagttcgttagtggtatctcgtggagaggagactcaactggctatgctgattccgtcaaaggtcgtttcacgatcagtcgtgacaacgcaaagaacactgtagaccttcagatgaactctctgaagcctgaggacactgccatctactactgtgcagctgctgcaggttctgcttggtatggtacattgtacgagtacgactattggggacaaggtacacaggtcacagtaagttcatctcctagcactccaccaacgccatctccttccacaccacctggtctgaacgacatcttcgaagcacagaagatcgaatggcatggatctagtggatctggtcaccaccatcatcaccacgcagcagcagaacagaagctcatctcagaagaggatgcagctgca

SEQ ID NO: 1455 - DNA, 2841 bp, Artificial Sequence
  Description of Artificial Sequence: Synthetic polynucleotide
attacgcatggctgttatacccgtacgcgtcataaacacaagttgaagaaaactctgatcatgttatccgctggacttggactttttttttacgtgaatcagaactctttcgctaatggggaaaattattttaaactgggatcagacagcaaattacttacgcatgactcataccagaatcgtctgttttatacgctgaaaactggtgaaaccgttgcagatttaagtaaaagtcaggacattaacctgtcaactatttggtcacttaataaacacttatattcgagcgaatcggaaatgatgaaagctgcaccggggcaacaaatcatcttgcccctgaagaaattgccctttgaatactccgctttgcccttgctgggctcggctcctctggtagccgccggaggcgttgccggtcacactaataagctgacaaaaatgtcacccgacgtgacgaagagcaacatgacggatgataaggctttaaattacgcagctcagcaagcggcctcgttgggaagtcagttacagagtcgttcgttaaatggtgattatgctaaggataccgcattgggtattgccggcaaccaagcgtcgagccaacttcaggcatggttgcaacattacggcactgctgaagtaaatctgcaatcaggtaataattttgacggtagttccctggatttccttttacctttttacgattcagaaaagatgttggctttcggacaggtgggggcgcgttacatcgattcacgttttaccgctaacttgggggccggtcaacgcttcttcttacctgccaatatgttgggctataatgtatttatcgaccaggacttcagtggtgacaatacacgtctgggaattggtggagagtattggcgcgattactttaagtcatctgtaaatggctattttcgcatgagcggttggcatgaaagttacaacaagaaagactacgatgagcgccccgcgaacgggtttgacatccgttttaatggttatttgccatcttatcccgccttgggagctaaattaatctacgagcaatactatggagataacgtagctttgtttaatagcgacaagttacagtctaatccaggagcggctacagtgggagttaattataccccaatcccactggtcacaatgggaatcgattatcgccacgggactggtaatgaaaacgatttattatactccatgcagtttcgttatcagttcgataagagttggtcgcagcagattgagcctcaatatgttaacgaattacgtaccttgtccggcagtcgctacgatctggtacaacgcaataacaatatcatccttgagtataagaaacaggacattctgtctttgaacattccacatgatattaatggtaccgagcactcaacacaaaaaattcagctgattgtgaaatcaaagtatggactggaccgtatcgtgtgggatgatagcgctctgcgcagtcagggtggacagatccagcactcgggtagccagtctgcccaagactaccaggctatcctgccagcgtatgtccaagggggaagtaacatctacaaagttacagctcgcgcctatgaccgcaacggtaattctagtaataatgtgcagttgacaattacggtgctgtccaatgggcaggtcgtcgatcaggtaggtgtgacggattttacagccgataaaacctctgcgaaggcagataacgcggataccatcacatacactgccactgtaaaaaaaaacggtgtcgcgcaggcaaacgttcctgttagcttcaacatcgtgtcgggtacagccacccttggggccaactcggcaaagactgacgcgaatggcaaggctacagtcacgttgaaatcctcgacaccaggacaggtcgttgtgtctgccaagacagcagagatgacctccgcccttaatgcatctgctgttatcttcttcgatcaaacgaaggcatctgtcgactataaggatgacgacgacaagagatctacggcattgacggaaggtgcacctaacatcacaaacctttgtccgtttggtgaagtcttcaatgctactcgcttcgccagtgtgtatgcctggaacaggaagcggatctcgaactgtgtagcagactacagcgtactgtacaacagtgcatccttctctaccttcaagtgttacggtgtctctcctacgaagttgaacgacttgtgcttcaccaacgtgtatgcagactccttcgtcatcagaggtgatgaagttcgtcagatcgctccaggtcagacaggcaagatcgcagactacaactacaagttgcctgatgacttcacaggatgtgtgatcgcttggaactccaacaacttggactccaaggttggtggcaactacaactacttgtaccgtttgttccgtaagagcaacctgaagccattcgaacgtgacatctcgactgagatctaccaagcaggtagtactccatgcaacggagtcgaaggattcaactgctacttccctttgcagagctacggattccaaccaacgaacggagtaggttaccaaccataccgtgtggtcgtgttgtcgttcgagttgctgcatgcacctgcaacggtctgtggtcctaagaagagcacgaacctggtcaagaacaagtgtgtcaacttcaacttcaacggacttactggtactggagtgttgactgagtcgaacaagaagttcttaccgttccagcagtttggtagagacattgctgatactactgacgctgttcgtgatccacagacgctggagatcctggacatcactccttgttcaggatccggtcaccaccatcatcaccac

SEQ ID NO: 1456 - DNA, 1752 bp, Artificial Sequence
  Description of Artificial Sequence: Synthetic polynucleotide
aaggcaaaacgcttcaagattaacgctatcagtttatccatctttttagcgtatgcgttgactccgtactcagaggcaactagtcaccaccatcatcaccactcgggtcgtgttcaaccgactgaaagtatcgttagattccctaacatcacaaacctttgtccgtttggtgaagtcttcaatgctactcgcttcgccagtgtgtatgcctggaacaggaagcggatctcgaactgtgtagcagactacagcgtactgtacaacagtgcatccttctctaccttcaagtgttacggtgtctctcctacgaagttgaacgacttgtgcttcaccaacgtgtatgcagactccttcgtcatcagaggtgatgaagttcgtcagatcgctccaggtcagacaggcaagatcgcagactacaactacaagttgcctgatgacttcacaggatgtgtgatcgcttggaactccaacaacttggactccaaggttggtggcaactacaactacttgtaccgtttgttccgtaagagcaacctgaagccattcgaacgtgacatctcgactgagatctaccaagcaggtagtactccatgcaacggagtcgaaggattcaactgctacttccctttgcagagctacggattccaaccaacgaacggagtaggttaccaaccataccgtgtggtcgtgttgtcgttcgagttgctgcatgcacctgcaacggtctgcggacctaaaaagtccacaaacttagtgaagaacaagtgtgttaacttctctggtggaggagggtctggtggaggcggagactataaggatgacgacgacaagagatctccgcgtgctgcacaaccgcgtacacaagctgcagcccaggccgacgcagtatccacgaacacaaattcagcgttgagtgatgctatggcttcaactcaatcaattcttttggacaccggcgcatatttaactcgccatatcgcccaaaagtctcgtgcggatgcagaaaaaaatagcgtgtggatgtcgaatactgggtatgggcgcgactacgcctctgcgcagtaccgccgtttcagcagcaaacgcacccagactcaaatcgggatcgatcgtagtcttagtgagaatatgcagattggcggagttctgacttattccgactctcaacatacgttcgaccaggcagggggcaagaatacgtttgtacaggccaatctttacggaaagtactacttgaatgatgcctggtatgtcgctggggacattggcgcagggagcttgcgttcccgccttcaaacgcaacaaaaggcgaatttcaatcgcaccagcattcagactggccttacacttgggaatacacttaagattaatcaatttgagattgtgcccagtgctgggattcgttatagtcgtttatccagcgcagactataagttaggcgacgactctgtgaaagttagctcaatggccgtgaagacgttgacggctggtttggatttcgcctatcgctttaaagttggaaatctgaccgtgaagccgctgctttcggccgcttattttgcaaactacggcaagggcggcgttaatgtcggtggtaagagtttcgcctataaagctgacaatcagcagcaatattcggccggcgtcgcgttgttgtatcgcaacgtgactttaaatgtaaacggctccatcacaaagggcaagcagttggagaagcaaaagtcaggccaaatcaagattcaaatccgtttc

SEQ ID NO: 1457 - DNA, 4452 bp, Artificial Sequence
  Description of Artificial Sequence: Synthetic polynucleotide
attacgcatggctgttatacccgtacgcgtcataaacacaagttgaagaaaactctgatcatgttatccgctggacttggactttttttttacgtgaatcagaactctttcgctaatggggaaaattattttaaactgggatcagacagcaaattacttacgcatgactcataccagaatcgtctgttttatacgctgaaaactggtgaaaccgttgcagatttaagtaaaagtcaggacattaacctgtcaactatttggtcacttaataaacacttatattcgagcgaatcggaaatgatgaaagctgcaccggggcaacaaatcatcttgcccctgaagaaattgccctttgaatactccgctttgcccttgctgggctcggctcctctggtagccgccggaggcgttgccggtcacactaataagctgacaaaaatgtcacccgacgtgacgaagagcaacatgacggatgataaggctttaaattacgcagctcagcaagcggcctcgttgggaagtcagttacagagtcgttcgttaaatggtgattatgctaaggataccgcattgggtattgccggcaaccaagcgtcgagccaacttcaggcatggttgcaacattacggcactgctgaagtaaatctgcaatcaggtaataattttgacggtagttccctggatttccttttacctttttacgattcagaaaagatgttggctttcggacaggtgggggcgcgttacatcgattcacgttttaccgctaacttgggggccggtcaacgcttcttcttacctgccaatatgttgggctataatgtatttatcgaccaggacttcagtggtgacaatacacgtctgggaattggtggagagtattggcgcgattactttaagtcatctgtaaatggctattttcgcatgagcggttggcatgaaagttacaacaagaaagactacgatgagcgccccgcgaacgggtttgacatccgttttaatggttatttgccatcttatcccgccttgggagctaaattaatctacgagcaatactatggagataacgtagctttgtttaatagcgacaagttacagtctaatccaggagcggctacagtgggagttaattataccccaatcccactggtcacaatgggaatcgattatcgccacgggactggtaatgaaaacgatttattatactccatgcagtttcgttatcagttcgataagagttggtcgcagcagattgagcctcaatatgttaacgaattacgtaccttgtccggcagtcgctacgatctggtacaacgcaataacaatatcatccttgagtataagaaacaggacattctgtctttgaacattccacatgatattaatggtaccgagcactcaacacaaaaaattcagctgattgtgaaatcaaagtatggactggaccgtatcgtgtgggatgatagcgctctgcgcagtcagggtggacagatccagcactcgggtagccagtctgcccaagactaccaggctatcctgccagcgtatgtccaagggggaagtaacatctacaaagttacagctcgcgcctatgaccgcaacggtaattctagtaataatgtgcagttgacaattacggtgctgtccaatgggcaggtcgtcgatcaggtaggtgtgacggattttacagccgataaaacctctgcgaaggcagataacgcggataccatcacatacactgccactgtaaaaaaaaacggtgtcgcgcaggcaaacgttcctgttagcttcaacatcgtgtcgggtacagccacccttggggccaactcggcaaagactgacgcgaatggcaaggctacagtcacgttgaaatcctcgacaccaggacaggtcgttgtgtctgccaagacagcagagatgacctccgcccttaatgcatctgctgttatcttcttcgatcaaacgaaggcatctgtcagatctacggcattgacggaaggtgcacctaacatcacaaacctttgtccgtttggtgaagtcttcaatgctactcgcttcgccagtgtgtatgcctggaacaggaagcggatctcgaactgtgtagcagactacagcgtactgtacaacagtgcatccttctctaccttcaagtgttacggtgtctctcctacgaagttgaacgacttgtgcttcaccaacgtgtatgcagactccttcgtcatcagaggtgatgaagttcgtcagatcgctccaggtcagacaggcaagatcgcagactacaactacaagttgcctgatgacttcacaggatgtgtgatcgcttggaactccaacaacttggactccaaggttggtggcaactacaactacttgtaccgtttgttccgtaagagcaacctgaagccattcgaacgtgacatctcgactgagatctaccaagcaggtagtactccatgcaacggagtcgaaggattcaactgctacttccctttgcagagctacggattccaaccaacgaacggagtaggttaccaaccataccgtgtggtcgtgttgtcgttcgagttgctgcatgcacctgcaacggtctgtggtcctaagaagagcacgaacctggtcaagaacaagtgtgtcaacttcaacttcaacggacttactggtactggagtgttgactgagtcgaacaagaagttcttaccgttccagcagtttggtagagacattgctgatactactgacgctgttcgtgatccacagacgctggagatcctggacatcactccttgttcatctggtggaggagggagtggaggtggcggttcaggaggcggtggacctaacatcacgaacttgtgtcctttcggagaggtgttcaacgctacgcgctttgcgagtgtctatgcttggaacaggaagcgtatctcgaactgtgtcgcagactactcagtgctgtacaacagcgcttcattctcgaccttcaagtgctatggtgtatctcccacgaagctgaacgatctgtgcttcacgaacgtgtacgcagactcgttcgtcatccgtggtgatgaagtgagacagatagcacctggacagactggcaagatcgctgactacaactacaagcttccagacgatttcaccggttgtgttatcgcttggaattcgaacaacttggattccaaggtaggaggaaactacaactacctgtatcgcttgttcagaaagtccaatttgaagccattcgaacgtgacatctcgaccgaaatctatcaggcaggcagtactccatgcaacggtgtagaagggtttaactgttacttcccattgcagtcatacggattccaacctacgaatggagtaggataccagccataccgtgttgttgtcctgagctttgaattgttacatgcaccagctactgtctgtggtcctaagaagtctacgaacctggtgaagaacaagtgcgtgaacttcaacttcaacggattgactggtactggtgttcttacggagtctaacaagaagttccttcctttccagcagttcggtcgtgacatcgctgacacaaccgatgctgttagagatccgcagaccttggagatcttggacatcacaccgtgctcttcaggtggaggaggcagtggcggaggtggtagcggtggaggtggtcctaacatcacgaacttgtgtccgttcggtgaagtgttcaacgcaactcgcttcgcttctgtgtatgcatggaacaggaagcgtatcagcaactgtgtggcagactactcagtactgtacaacagtgcatccttctcaaccttcaagtgctatggtgtctcaccgacgaagctgaacgacctgtgcttcaccaacgtgtacgcagactcgttcgtcatccgtggagatgaggttcgtcagattgcaccaggtcagacaggtaagattgcagactacaactacaagttgccagatgacttcactggctgcgtgattgcatggaacagcaacaacctggactcgaaggttggaggtaactataactacctctatcgtctgttcaggaagtcgaacttgaagcctttcgagcgtgacatcagcacagagatctaccaagcaggtagcactccttgcaacggtgttgaaggattcaactgctactttccgttgcagtcgtatggattccaacctaccaatggagttggataccaaccataccgtgtcgtggtgttgtccttcgagttgttgcatgctcctgctactgtctgtggaccaaagaagagcacgaatctggtcaagaacaagtgtgtgaatttcaacttcaacggattgaccggaacaggagtcctgacggagtcgaacaagaagttcctgcctttccagcagttcggtagagacatcgcggatactaccgatgctgtacgagaccctcagacgttggagatcttggacattacgccatgcagt

SEQ ID NO: 1458 - DNA, 3645 bp, Artificial Sequence
  Description of Artificial Sequence: Synthetic polynucleotide
attacgcatggctgttatacccgtacgcgtcataaacacaagttgaagaaaactctgatcatgttatccgctggacttggactttttttttacgtgaatcagaactctttcgctaatggggaaaattattttaaactgggatcagacagcaaattacttacgcatgactcataccagaatcgtctgttttatacgctgaaaactggtgaaaccgttgcagatttaagtaaaagtcaggacattaacctgtcaactatttggtcacttaataaacacttatattcgagcgaatcggaaatgatgaaagctgcaccggggcaacaaatcatcttgcccctgaagaaattgccctttgaatactccgctttgcccttgctgggctcggctcctctggtagccgccggaggcgttgccggtcacactaataagctgacaaaaatgtcacccgacgtgacgaagagcaacatgacggatgataaggctttaaattacgcagctcagcaagcggcctcgttgggaagtcagttacagagtcgttcgttaaatggtgattatgctaaggataccgcattgggtattgccggcaaccaagcgtcgagccaacttcaggcatggttgcaacattacggcactgctgaagtaaatctgcaatcaggtaataattttgacggtagttccctggatttccttttacctttttacgattcagaaaagatgttggctttcggacaggtgggggcgcgttacatcgattcacgttttaccgctaacttgggggccggtcaacgcttcttcttacctgccaatatgttgggctataatgtatttatcgaccaggacttcagtggtgacaatacacgtctgggaattggtggagagtattggcgcgattactttaagtcatctgtaaatggctattttcgcatgagcggttggcatgaaagttacaacaagaaagactacgatgagcgccccgcgaacgggtttgacatccgttttaatggttatttgccatcttatcccgccttgggagctaaattaatctacgagcaatactatggagataacgtagctttgtttaatagcgacaagttacagtctaatccaggagcggctacagtgggagttaattataccccaatcccactggtcacaatgggaatcgattatcgccacgggactggtaatgaaaacgatttattatactccatgcagtttcgttatcagttcgataagagttggtcgcagcagattgagcctcaatatgttaacgaattacgtaccttgtccggcagtcgctacgatctggtacaacgcaataacaatatcatccttgagtataagaaacaggacattctgtctttgaacattccacatgatattaatggtaccgagcactcaacacaaaaaattcagctgattgtgaaatcaaagtatggactggaccgtatcgtgtgggatgatagcgctctgcgcagtcagggtggacagatccagcactcgggtagccagtctgcccaagactaccaggctatcctgccagcgtatgtccaagggggaagtaacatctacaaagttacagctcgcgcctatgaccgcaacggtaattctagtaataatgtgcagttgacaattacggtgctgtccaatgggcaggtcgtcgatcaggtaggtgtgacggattttacagccgataaaacctctgcgaaggcagataacgcggataccatcacatacactgccactgtaaaaaaaaacggtgtcgcgcaggcaaacgttcctgttagcttcaacatcgtgtcgggtacagccacccttggggccaactcggcaaagactgacgcgaatggcaaggctacagtcacgttgaaatcctcgacaccaggacaggtcgttgtgtctgccaagacagcagagatgacctccgcccttaatgcatctgctgttatcttcttcgatcaaacgaaggcatctgtcgactataaggatgacgacgacaagagatctacggcattgacggaaggtgcacctaacatcacaaacctttgtccgtttggtgaagtcttcaatgctactcgcttcgccagtgtgtatgcctggaacaggaagcggatctcgaactgtgtagcagactacagcgtactgtacaacagtgcatccttctctaccttcaagtgttacggtgtctctcctacgaagttgaacgacttgtgcttcaccaacgtgtatgcagactccttcgtcatcagaggtgatgaagttcgtcagatcgctccaggtcagacaggcaagatcgcagactacaactacaagttgcctgatgacttcacaggatgtgtgatcgcttggaactccaacaacttggactccaaggttggtggcaactacaactacttgtaccgtttgttccgtaagagcaacctgaagccattcgaacgtgacatctcgactgagatctaccaagcaggtagtactccatgcaacggagtcgaaggattcaactgctacttccctttgcagagctacggattccaaccaacgaacggagtaggttaccaaccataccgtgtggtcgtgttgtcgttcgagttgctgcatgcacctgcaacggtctgtggtcctaagaagagcacgaacctggtcaagaacaagtgtgtcaacttcaacttcaacggacttactggtactggagtgttgactgagtcgaacaagaagttcttaccgttccagcagtttggtagagacattgctgatactactgacgctgttcgtgatccacagacgctggagatcctggacatcactccttgttcatctggtggaggagggagtggaggtggcggttcaggaggcggtggacctaacatcacgaacttgtgtcctttcggagaggtgttcaacgctacgcgctttgcgagtgtctatgcttggaacaggaagcgtatctcgaactgtgtcgcagactactcagtgctgtacaacagcgcttcattctcgaccttcaagtgctatggtgtatctcccacgaagctgaacgatctgtgcttcacgaacgtgtacgcagactcgttcgtcatccgtggtgatgaagtgagacagatagcacctggacagactggcaagatcgctgactacaactacaagcttccagacgatttcaccggttgtgttatcgcttggaattcgaacaacttggattccaaggtaggaggaaactacaactacctgtatcgcttgttcagaaagtccaatttgaagccattcgaacgtgacatctcgaccgaaatctatcaggcaggcagtactccatgcaacggtgtagaagggtttaactgttacttcccattgcagtcatacggattccaacctacgaatggagtaggataccagccataccgtgttgttgtcctgagctttgaattgttacatgcaccagctactgtctgtggtcctaagaagtctacgaacctggtgaagaacaagtgcgtgaacttcaacttcaacggattgactggtactggtgttcttacggagtctaacaagaagttccttcctttccagcagttcggtcgtgacatcgctgacacaaccgatgctgttagagatccgcagaccttggagatcttggacatcacaccgtgctct

SEQ ID NO: 1459 - DNA, 1434 bp, Artificial Sequence
  Description of Artificial Sequence: Synthetic polynucleotide
ttaatcaatagaaacattgtcgccctttttgccctgccattcatggcgagtgcgaccgcttccgagttaagcataggggccggcgctgcgtataatgagagtccttaccgtggctataatgaaaacacaaaggcaatcccccttatctcgtatgaaggcgacaccttctatgtacgtcagactacattaggtttcatcttaagccagtccgagaaaaacgagttatcgctgacagcttcatggatgccattggaattcgacccgacagataatgatgattatgcgatgcagcagctggacaaacgggattcgacagctatggccggcgtggcttggtatcaccacgagcggtggggaactgtcaaagcttccgccgccgctgacgtgttagacaacagcaatggctgggtgggggaattaagcgtgttccataagatgcagataggtagattatcccttacaccggctttgggagtcctgtattatgatgagaacttttccgactattattatgggatttctgagtctgaaagtcgtcggagcggtcttgcgtcgtactcggcgcaagacgcgtgggtgccttatgtatctttgacagcgaagtatccaataggcgagcacgtggtattgatggcaagtgctggttattccgagttgcccgaagaaattactgacagtcctatgatagaccgtgactataaggatgacgacgacaagtctggtggaggagggtctggtggaggcggacgtgttcaaccgactgaaagtatcgttagattccctaacatcacaaacctttgtccgtttggtgaagtcttcaatgctactcgcttcgccagtgtgtatgcctggaacaggaagcggatctcgaactgtgtagcagactacagcgtactgtacaacagtgcatccttctctaccttcaagtgttacggtgtctctcctacgaagttgaacgacttgtgcttcaccaacgtgtatgcagactccttcgtcatcagaggtgatgaagttcgtcagatcgctccaggtcagacaggcaagatcgcagactacaactacaagttgcctgatgacttcacaggatgtgtgatcgcttggaactccaacaacttggactccaaggttggtggcaactacaactacttgtaccgtttgttccgtaagagcaacctgaagccattcgaacgtgacatctcgactgagatctaccaagcaggtagtactccatgcaacggagtcgaaggattcaactgctacttccctttgcagagctacggattccaaccaacgaacggagtaggttaccaaccataccgtgtggtcgtgttgtcgttcgagttgctgcatgcacctgcaacggtctgcggacctaaaaagtccacaaacttagtgaagaacaagtgtgttaacttccaccaccatcatcaccac

SEQ ID NO: 1460 - DNA, 2718 bp, Artificial Sequence
  Description of Artificial Sequence: Synthetic polynucleotide
attacgcatggctgttatacccgtacgcgtcataaacacaagttgaagaaaactctgatcatgttatccgctggacttggactttttttttacgtgaatcagaactctttcgctaatggggaaaattattttaaactgggatcagacagcaaattacttacgcatgactcataccagaatcgtctgttttatacgctgaaaactggtgaaaccgttgcagatttaagtaaaagtcaggacattaacctgtcaactatttggtcacttaataaacacttatattcgagcgaatcggaaatgatgaaagctgcaccggggcaacaaatcatcttgcccctgaagaaattgccctttgaatactccgctttgcccttgctgggctcggctcctctggtagccgccggaggcgttgccggtcacactaataagctgacaaaaatgtcacccgacgtgacgaagagcaacatgacggatgataaggctttaaattacgcagctcagcaagcggcctcgttgggaagtcagttacagagtcgttcgttaaatggtgattatgctaaggataccgcattgggtattgccggcaaccaagcgtcgagccaacttcaggcatggttgcaacattacggcactgctgaagtaaatctgcaatcaggtaataattttgacggtagttccctggatttccttttacctttttacgattcagaaaagatgttggctttcggacaggtgggggcgcgttacatcgattcacgttttaccgctaacttgggggccggtcaacgcttcttcttacctgccaatatgttgggctataatgtatttatcgaccaggacttcagtggtgacaatacacgtctgggaattggtggagagtattggcgcgattactttaagtcatctgtaaatggctattttcgcatgagcggttggcatgaaagttacaacaagaaagactacgatgagcgccccgcgaacgggtttgacatccgttttaatggttatttgccatcttatcccgccttgggagctaaattaatctacgagcaatactatggagataacgtagctttgtttaatagcgacaagttacagtctaatccaggagcggctacagtgggagttaattataccccaatcccactggtcacaatgggaatcgattatcgccacgggactggtaatgaaaacgatttattatactccatgcagtttcgttatcagttcgataagagttggtcgcagcagattgagcctcaatatgttaacgaattacgtaccttgtccggcagtcgctacgatctggtacaacgcaataacaatatcatccttgagtataagaaacaggacattctgtctttgaacattccacatgatattaatggtaccgagcactcaacacaaaaaattcagctgattgtgaaatcaaagtatggactggaccgtatcgtgtgggatgatagcgctctgcgcagtcagggtggacagatccagcactcgggtagccagtctgcccaagactaccaggctatcctgccagcgtatgtccaagggggaagtaacatctacaaagttacagctcgcgcctatgaccgcaacggtaattctagtaataatgtgcagttgacaattacggtgctgtccaatgggcaggtcgtcgatcaggtaggtgtgacggattttacagccgataaaacctctgcgaaggcagataacgcggataccatcacatacactgccactgtaaaaaaaaacggtgtcgcgcaggcaaacgttcctgttagcttcaacatcgtgtcgggtacagccacccttggggccaactcggcaaagactgacgcgaatggcaaggctacagtcacgttgaaatcctcgacaccaggacaggtcgttgtgtctgccaagacagcagagatgacctccgcccttaatgcatctgctgttatcttcttcgatcaaacgaaggcatctgtcgactataaggatgacgacgacaagtctggtggaggagggtctggtggaggcggacgtgttcaaccgactgaaagtatcgttagattccctaacatcacaaacctttgtccgtttggtgaagtcttcaatgctactcgcttcgccagtgtgtatgcctggaacaggaagcggatctcgaactgtgtagcagactacagcgtactgtacaacagtgcatccttctctaccttcaagtgttacggtgtctctcctacgaagttgaacgacttgtgcttcaccaacgtgtatgcagactccttcgtcatcagaggtgatgaagttcgtcagatcgctccaggtcagacaggcaagatcgcagactacaactacaagttgcctgatgacttcacaggatgtgtgatcgcttggaactccaacaacttggactccaaggttggtggcaactacaactacttgtaccgtttgttccgtaagagcaacctgaagccattcgaacgtgacatctcgactgagatctaccaagcaggtagtactccatgcaacggagtcgaaggattcaactgctacttccctttgcagagctacggattccaaccaacgaacggagtaggttaccaaccataccgtgtggtcgtgttgtcgttcgagttgctgcatgcacctgcaacggtctgcggacctaaaaagtccacaaacttagtgaagaacaagtgtgttaacttccaccaccatcatcaccac

SEQ ID NO: 1461 - DNA, 1197 bp, Artificial Sequence
  Description of Artificial Sequence: Synthetic polynucleotide
aaagcaacaaaacttgtgttaggcgcggttatacttggctccaccctgcttgcaggttgctcgtctaacgcgaagatcgaccagggtatcaatccttacgtcgggtttgaaatgggatacgattggttgggacgtatgccttataagggaagtgttgaaaacggcgcttataaggcgcagggagtacagttaacggccaagcttgggtaccccataacagacgatttagatatttatacccgtttaggaggaatggtttggagagccgacacgaagtctaatgtatatggtaagaaccacgacacgggagtatcccccgtctttgcagggggagtggaatatgctatcacaccagagatcgctacccgtttggaatatcaatggacgaataatataggcgacgcccatacgataggaacgcggcccgacaacggcatccctggggtcgactataaggatgacgacgacaagtctggtggaggagggtctggtggaggcggacgtgttcaaccgactgaaagtatcgttagattccctaacatcacaaacctttgtccgtttggtgaagtcttcaatgctactcgcttcgccagtgtgtatgcctggaacaggaagcggatctcgaactgtgtagcagactacagcgtactgtacaacagtgcatccttctctaccttcaagtgttacggtgtctctcctacgaagttgaacgacttgtgcttcaccaacgtgtatgcagactccttcgtcatcagaggtgatgaagttcgtcagatcgctccaggtcagacaggcaagatcgcagactacaactacaagttgcctgatgacttcacaggatgtgtgatcgcttggaactccaacaacttggactccaaggttggtggcaactacaactacttgtaccgtttgttccgtaagagcaacctgaagccattcgaacgtgacatctcgactgagatctaccaagcaggtagtactccatgcaacggagtcgaaggattcaactgctacttccctttgcagagctacggattccaaccaacgaacggagtaggttaccaaccataccgtgtggtcgtgttgtcgttcgagttgctgcatgcacctgcaacggtctgcggacctaaaaagtccacaaacttagtgaagaacaagtgtgttaacttcggatccggccaccaccatcatcaccac

SEQ ID NO: 1462 - protein, 144 aa, Artificial Sequence
  Description of Artificial Sequence: Synthetic polypeptide
KATKLVLGAVILGSTLLAGCSSNAKIDQGINPYVGFEMGYDWLGRMPYKGSVENGAYKAQGVQLTAKLGYPITDDLDIYTRLGGMVWRADTKSNVYGKNHDTGVSPVFAGGVEYAITPEIATRLEYQWTNNIGDAHTIGTRPDN

SEQ ID NO: 1463 - protein, 658 aa, Artificial Sequence
  Description of Artificial Sequence: Synthetic polypeptide
ITHGCYTRTRHKHKLKKTLIMLSAGLGLFFYVNQNSFANGENYFKLGSDSKLLTHDSYQNRLFYTLKTGETVADLSKSQDINLSTIWSLNKHLYSSESEMMKAAPGQQIILPLKKLPFEYSALPLLGSAPLVAAGGVAGHTNKLTKMSPDVTKSNMTDDKALNYAAQQAASLGSQLQSRSLNGDYAKDTALGIAGNQASSQLQAWLQHYGTAEVNLQSGNNFDGSSLDFLLPFYDSEKMLAFGQVGARYIDSRFTANLGAGQRFFLPANMLGYNVFIDQDFSGDNTRLGIGGEYWRDYFKSSVNGYFRMSGWHESYNKKDYDERPANGFDIRFNGYLPSYPALGAKLIYEQYYGDNVALFNSDKLQSNPGAATVGVNYTPIPLVTMGIDYRHGTGNENDLLYSMQFRYQFDKSWSQQIEPQYVNELRTLSGSRYDLVQRNNNIILEYKKQDILSLNIPHDINGTEHSTQKIQLIVKSKYGLDRIVWDDSALRSQGGQIQHSGSQSAQDYQAILPAYVQGGSNIYKVTARAYDRNGNSSNNVQLTITVLSNGQVVDQVGVTDFTADKTSAKADNADTITYTATVKKNGVAQANVPVSFNIVSGTATLGANSAKTDANGKATVTLKSSTPGQVVVSAKTAEMTSALNASAVIFFDQTKAS

SEQ ID NO: 1464 - protein, 305 aa, Artificial Sequence
  Description of Artificial Sequence: Synthetic polypeptide
PRAAQPRTQAAAQADAVSTNTNSALSDAMASTQSILLDTGAYLTRHIAQKSRADAEKNSVWMSNTGYGRDYASAQYRRFSSKRTQTQIGIDRSLSENMQIGGVLTYSDSQHTFDQAGGKNTFVQANLYGKYYLNDAWYVAGDIGAGSLRSRLQTQQKANFNRTSIQTGLTLGNTLKINQFEIVPSAGIRYSRLSSADYKLGDDSVKVSSMAVKTLTAGLDFAYRFKVGNLTVKPLLSAAYFANYGKGGVNVGGKSFAYKADNQQQYSAGVALLYRNVTLNVNGSITKGKQLEKQKSGQIKIQIRF

SEQ ID NO: 1465 - protein, 232 aa, Artificial Sequence
  Description of Artificial Sequence: Synthetic polypeptide
MLINRNIVALFALPFMASATASELSIGAGAAYNESPYRGYNENTKAIPLISYEGDTFYVRQTTLGFILSQSEKNELSLTASWMPLEFDPTDNDDYAMQQLDKRDSTAMAGVAWYHHERWGTVKASAAADVLDNSNGWVGELSVFHKMQIGRLSLTPALGVLYYDENFSDYYYGISESESRRSGLASYSAQDAWVPYVSLTAKYPIGEHVVLMASAGYSELPEEITDSPMIDR

SEQ ID NO: 1466 - protein, 195 aa, Artificial Sequence
  Description of Artificial Sequence: Synthetic polypeptide
PNITNLCPFGEVFNATRFASVYAWNRKRISNCVADYSVLYNSASFSTFKCYGVSPTKLNDLCFTNVYADSFVIRGDEVRQIAPGQTGKIADYNYKLPDDFTGCVIAWNSNNLDSKVGGNYNYLYRLFRKSNLKPFERDISTEIYQAGSTPCNGVEGFNCYFPLQSYGFQPTNGVGYQPYRVVVLSFELLHAPATV

SEQ ID NO: 1467 - protein, 403 aa, Artificial Sequence
  Description of Artificial Sequence: Synthetic polypeptide
KATKLVLGAVILGSTLLAGCSSNAKIDQGINPYVGFEMGYDWLGRMPYKGSVENGAYKAQGVQLTAKLGYPITDDLDIYTRLGGMVWRADTKSNVYGKNHDTGVSPVFAGGVEYAITPEIATRLEYQWTNNIGDAHTIGTRPDNGIPGVDYKDDDDKQLTALTEGAKLFEKEIPYITELEGDVEGMKFIIKGEGTGDATTGTIKAKYICTTGDLPVPWATLVSTLSYGVQCFAKYPSHIKDFFKSAMPEGYTQERTISFEGDGVYKTRAMVTYERGSIYNRVTLTGENFKKDGHILRKNVAFQCPPSILYILPDTVNNGIRVEFNQAYDIEGVTEKLVTKCSQMNRPLAGSAAVHIPRYHHITYHTKLSKDRDERRDHMCLVEVVKAVDLDTYQGSGHHHHHH

SEQ ID NO: 1468 - protein, 428 aa, Artificial Sequence
  Description of Artificial Sequence: Synthetic polypeptide
KATKLVLGAVILGSTLLAGCSSNAKIDQGINPYVGFEMGYDWLGRMPYKGSVENGAYKAQGVQLTAKLGYPITDDLDIYTRLGGMVWRADTKSNVYGKNHDTGVSPVFAGGVEYAITPEIATRLEYQWTNNIGDAHTIGTRPDNGIPGVDYKDDDDKQLEVQLQQSGPELVKPGASVRMSCKSSGYIFTDFYMNWVRQSHGKSLDYIGYISPYSGVTGYNQKFKGKATLTVDKSSSTAYMELRSLTSEDSAVYYCAGSSGNKWAMDYWGHGASVTVSSGGGGSGGGGSGGGGSDIVLTQSPASLAVSLGQRATISCRSSQSLVHSNGNTYLNWYQQKPGQPPKLLIYKVSNRFSGVPARFSGSGSESDFTLTIDPVEEDDAAIYYCSQTTHVPPTFGSGTKLELKRASQPELAPEDPEDGSGHHHHHH

SEQ ID NO: 1469 - protein, 856 aa, Artificial Sequence
  Description of Artificial Sequence: Synthetic polypeptide
ITHGCYTRTRHKHKLKKTLIMLSAGLGLFFYVNQNSFANGENYFKLGSDSKLLTHDSYQNRLFYTLKTGETVADLSKSQDINLSTIWSLNKHLYSSESEMMKAAPGQQIILPLKKLPFEYSALPLLGSAPLVAAGGVAGHTNKLTKMSPDVTKSNMTDDKALNYAAQQAASLGSQLQSRSLNGDYAKDTALGIAGNQASSQLQAWLQHYGTAEVNLQSGNNFDGSSLDFLLPFYDSEKMLAFGQVGARYIDSRFTANLGAGQRFFLPANMLGYNVFIDQDFSGDNTRLGIGGEYWRDYFKSSVNGYFRMSGWHESYNKKDYDERPANGFDIRFNGYLPSYPALGAKLIYEQYYGDNVALFNSDKLQSNPGAATVGVNYTPIPLVTMGIDYRHGTGNENDLLYSMQFRYQFDKSWSQQIEPQYVNELRTLSGSRYDLVQRNNNIILEYKKQDILSLNIPHDINGTEHSTQKIQLIVKSKYGLDRIVWDDSALRSQGGQIQHSGSQSAQDYQAILPAYVQGGSNIYKVTARAYDRNGNSSNNVQLTITVLSNGQVVDQVGVTDFTADKTSAKADNADTITYTATVKKNGVAQANVPVSFNIVSGTATLGANSAKTDANGKATVTLKSSTPGQVVVSAKTAEMTSALNASAVIFFDQTKASVDYKDDDDKRSTALTEGAAQVKLEESGGGSVQTGGSLRLTCAASGRTSRSYGMGWFRQAPGKEREFVSGISWRGDSTGYADSVKGRFTISRDNAKNTVDLQMNSLKPEDTAIYYCAAAAGSAWYGTLYEYDYWGQGTQVTVSSSPSTPPTPSPSTPPGLNDIFEAQKIEWHGSSGSGHHHHHHAAAEQKLISEEDAAA

SEQ ID NO: 1470 - protein, 947 aa, Artificial Sequence
  Description of Artificial Sequence: Synthetic polypeptide
ITHGCYTRTRHKHKLKKTLIMLSAGLGLFFYVNQNSFANGENYFKLGSDSKLLTHDSYQNRLFYTLKTGETVADLSKSQDINLSTIWSLNKHLYSSESEMMKAAPGQQIILPLKKLPFEYSALPLLGSAPLVAAGGVAGHTNKLTKMSPDVTKSNMTDDKALNYAAQQAASLGSQLQSRSLNGDYAKDTALGIAGNQASSQLQAWLQHYGTAEVNLQSGNNFDGSSLDFLLPFYDSEKMLAFGQVGARYIDSRFTANLGAGQRFFLPANMLGYNVFIDQDFSGDNTRLGIGGEYWRDYFKSSVNGYFRMSGWHESYNKKDYDERPANGFDIRFNGYLPSYPALGAKLIYEQYYGDNVALFNSDKLQSNPGAATVGVNYTPIPLVTMGIDYRHGTGNENDLLYSMQFRYQFDKSWSQQIEPQYVNELRTLSGSRYDLVQRNNNIILEYKKQDILSLNIPHDINGTEHSTQKIQLIVKSKYGLDRIVWDDSALRSQGGQIQHSGSQSAQDYQAILPAYVQGGSNIYKVTARAYDRNGNSSNNVQLTITVLSNGQVVDQVGVTDFTADKTSAKADNADTITYTATVKKNGVAQANVPVSFNIVSGTATLGANSAKTDANGKATVTLKSSTPGQVVVSAKTAEMTSALNASAVIFFDQTKASVDYKDDDDKRSTALTEGAPNITNLCPFGEVFNATRFASVYAWNRKRISNCVADYSVLYNSASFSTFKCYGVSPTKLNDLCFTNVYADSFVIRGDEVRQIAPGQTGKIADYNYKLPDDFTGCVIAWNSNNLDSKVGGNYNYLYRLFRKSNLKPFERDISTEIYQAGSTPCNGVEGFNCYFPLQSYGFQPTNGVGYQPYRVVVLSFELLHAPATVCGPKKSTNLVKNKCVNFNFNGLTGTGVLTESNKKFLPFQQFGRDIADTTDAVRDPQTLEILDITPCSGSGHHHHHH

SEQ ID NO: 1471 - protein, 584 aa, Artificial Sequence
  Description of Artificial Sequence: Synthetic polypeptide
KAKRFKINAISLSIFLAYALTPYSEATSHHHHHHSGRVQPTESIVRFPNITNLCPFGEVFNATRFASVYAWNRKRISNCVADYSVLYNSASFSTFKCYGVSPTKLNDLCFTNVYADSFVIRGDEVRQIAPGQTGKIADYNYKLPDDFTGCVIAWNSNNLDSKVGGNYNYLYRLFRKSNLKPFERDISTEIYQAGSTPCNGVEGFNCYFPLQSYGFQPTNGVGYQPYRVVVLSFELLHAPATVCGPKKSTNLVKNKCVNFSGGGGSGGGGDYKDDDDKRSPRAAQPRTQAAAQADAVSTNTNSALSDAMASTQSILLDTGAYLTRHIAQKSRADAEKNSVWMSNTGYGRDYASAQYRRFSSKRTQTQIGIDRSLSENMQIGGVLTYSDSQHTFDQAGGKNTFVQANLYGKYYLNDAWYVAGDIGAGSLRSRLQTQQKANFNRTSIQTGLTLGNTLKINQFEIVPSAGIRYSRLSSADYKLGDDSVKVSSMAVKTLTAGLDFAYRFKVGNLTVKPLLSAAYFANYGKGGVNVGGKSFAYKADNQQQYSAGVALLYRNVTLNVNGSITKGKQLEKQKSGQIKIQIRF

SEQ ID NO: 1472 - protein, 1484 aa, Artificial Sequence
  Description of Artificial Sequence: Synthetic polypeptide
ITHGCYTRTRHKHKLKKTLIMLSAGLGLFFYVNQNSFANGENYFKLGSDSKLLTHDSYQNRLFYTLKTGETVADLSKSQDINLSTIWSLNKHLYSSESEMMKAAPGQQIILPLKKLPFEYSALPLLGSAPLVAAGGVAGHTNKLTKMSPDVTKSNMTDDKALNYAAQQAASLGSQLQSRSLNGDYAKDTALGIAGNQASSQLQAWLQHYGTAEVNLQSGNNFDGSSLDFLLPFYDSEKMLAFGQVGARYIDSRFTANLGAGQRFFLPANMLGYNVFIDQDFSGDNTRLGIGGEYWRDYFKSSVNGYFRMSGWHESYNKKDYDERPANGFDIRFNGYLPSYPALGAKLIYEQYYGDNVALFNSDKLQSNPGAATVGVNYTPIPLVTMGIDYRHGTGNENDLLYSMQFRYQFDKSWSQQIEPQYVNELRTLSGSRYDLVQRNNNIILEYKKQDILSLNIPHDINGTEHSTQKIQLIVKSKYGLDRIVWDDSALRSQGGQIQHSGSQSAQDYQAILPAYVQGGSNIYKVTARAYDRNGNSSNNVQLTITVLSNGQVVDQVGVTDFTADKTSAKADNADTITYTATVKKNGVAQANVPVSFNIVSGTATLGANSAKTDANGKATVTLKSSTPGQVVVSAKTAEMTSALNASAVIFFDQTKASVRSTALTEGAPNITNLCPFGEVFNATRFASVYAWNRKRISNCVADYSVLYNSASFSTFKCYGVSPTKLNDLCFTNVYADSFVIRGDEVRQIAPGQTGKIADYNYKLPDDFTGCVIAWNSNNLDSKVGGNYNYLYRLFRKSNLKPFERDISTEIYQAGSTPCNGVEGFNCYFPLQSYGFQPTNGVGYQPYRVVVLSFELLHAPATVCGPKKSTNLVKNKCVNFNFNGLTGTGVLTESNKKFLPFQQFGRDIADTTDAVRDPQTLEILDITPCSSGGGGSGGGGSGGGGPNITNLCPFGEVFNATRFASVYAWNRKRISNCVADYSVLYNSASFSTFKCYGVSPTKLNDLCFTNVYADSFVIRGDEVRQIAPGQTGKIADYNYKLPDDFTGCVIAWNSNNLDSKVGGNYNYLYRLFRKSNLKPFERDISTEIYQAGSTPCNGVEGFNCYFPLQSYGFQPTNGVGYQPYRVVVLSFELLHAPATVCGPKKSTNLVKNKCVNFNFNGLTGTGVLTESNKKFLPFQQFGRDIADTTDAVRDPQTLEILDITPCSSGGGGSGGGGSGGGGPNITNLCPFGEVFNATRFASVYAWNRKRISNCVADYSVLYNSASFSTFKCYGVSPTKLNDLCFTNVYADSFVIRGDEVRQIAPGQTGKIADYNYKLPDDFTGCVIAWNSNNLDSKVGGNYNYLYRLFRKSNLKPFERDISTEIYQAGSTPCNGVEGFNCYFPLQSYGFQPTNGVGYQPYRVVVLSFELLHAPATVCGPKKSTNLVKNKCVNFNFNGLTGTGVLTESNKKFLPFQQFGRDIADTTDAVRDPQTLEILDITPCS

SEQ ID NO: 1473 - protein, 1215 aa, Artificial Sequence
  Description of Artificial Sequence: Synthetic polypeptide
ITHGCYTRTRHKHKLKKTLIMLSAGLGLFFYVNQNSFANGENYFKLGSDSKLLTHDSYQNRLFYTLKTGETVADLSKSQDINLSTIWSLNKHLYSSESEMMKAAPGQQIILPLKKLPFEYSALPLLGSAPLVAAGGVAGHTNKLTKMSPDVTKSNMTDDKALNYAAQQAASLGSQLQSRSLNGDYAKDTALGIAGNQASSQLQAWLQHYGTAEVNLQSGNNFDGSSLDFLLPFYDSEKMLAFGQVGARYIDSRFTANLGAGQRFFLPANMLGYNVFIDQDFSGDNTRLGIGGEYWRDYFKSSVNGYFRMSGWHESYNKKDYDERPANGFDIRFNGYLPSYPALGAKLIYEQYYGDNVALFNSDKLQSNPGAATVGVNYTPIPLVTMGIDYRHGTGNENDLLYSMQFRYQFDKSWSQQIEPQYVNELRTLSGSRYDLVQRNNNIILEYKKQDILSLNIPHDINGTEHSTQKIQLIVKSKYGLDRIVWDDSALRSQGGQIQHSGSQSAQDYQAILPAYVQGGSNIYKVTARAYDRNGNSSNNVQLTITVLSNGQVVDQVGVTDFTADKTSAKADNADTITYTATVKKNGVAQANVPVSFNIVSGTATLGANSAKTDANGKATVTLKSSTPGQVVVSAKTAEMTSALNASAVIFFDQTKASVDYKDDDDKRSTALTEGAPNITNLCPFGEVFNATRFASVYAWNRKRISNCVADYSVLYNSASFSTFKCYGVSPTKLNDLCFTNVYADSFVIRGDEVRQIAPGQTGKIADYNYKLPDDFTGCVIAWNSNNLDSKVGGNYNYLYRLFRKSNLKPFERDISTEIYQAGSTPCNGVEGFNCYFPLQSYGFQPTNGVGYQPYRVVVLSFELLHAPATVCGPKKSTNLVKNKCVNFNFNGLTGTGVLTESNKKFLPFQQFGRDIADTTDAVRDPQTLEILDITPCSSGGGGSGGGGSGGGGPNITNLCPFGEVFNATRFASVYAWNRKRISNCVADYSVLYNSASFSTFKCYGVSPTKLNDLCFTNVYADSFVIRGDEVRQIAPGQTGKIADYNYKLPDDFTGCVIAWNSNNLDSKVGGNYNYLYRLFRKSNLKPFERDISTEIYQAGSTPCNGVEGFNCYFPLQSYGFQPTNGVGYQPYRVVVLSFELLHAPATVCGPKKSTNLVKNKCVNFNFNGLTGTGVLTESNKKFLPFQQFGRDIADTTDAVRDPQTLEILDITPCS

SEQ ID NO: 1474 - protein, 478 aa, Artificial Sequence
  Description of Artificial Sequence: Synthetic polypeptide
LINRNIVALFALPFMASATASELSIGAGAAYNESPYRGYNENTKAIPLISYEGDTFYVRQTTLGFILSQSEKNELSLTASWMPLEFDPTDNDDYAMQQLDKRDSTAMAGVAWYHHERWGTVKASAAADVLDNSNGWVGELSVFHKMQIGRLSLTPALGVLYYDENFSDYYYGISESESRRSGLASYSAQDAWVPYVSLTAKYPIGEHVVLMASAGYSELPEEITDSPMIDRDYKDDDDKSGGGGSGGGGRVQPTESIVRFPNITNLCPFGEVFNATRFASVYAWNRKRISNCVADYSVLYNSASFSTFKCYGVSPTKLNDLCFTNVYADSFVIRGDEVRQIAPGQTGKIADYNYKLPDDFTGCVIAWNSNNLDSKVGGNYNYLYRLFRKSNLKPFERDISTEIYQAGSTPCNGVEGFNCYFPLQSYGFQPTNGVGYQPYRVVVLSFELLHAPATVCGPKKSTNLVKNKCVNFHHHHHH

SEQ ID NO: 1475 - protein, 906 aa, Artificial Sequence
  Description of Artificial Sequence: Synthetic polypeptide
ITHGCYTRTRHKHKLKKTLIMLSAGLGLFFYVNQNSFANGENYFKLGSDSKLLTHDSYQNRLFYTLKTGETVADLSKSQDINLSTIWSLNKHLYSSESEMMKAAPGQQIILPLKKLPFEYSALPLLGSAPLVAAGGVAGHTNKLTKMSPDVTKSNMTDDKALNYAAQQAASLGSQLQSRSLNGDYAKDTALGIAGNQASSQLQAWLQHYGTAEVNLQSGNNFDGSSLDFLLPFYDSEKMLAFGQVGARYIDSRFTANLGAGQRFFLPANMLGYNVFIDQDFSGDNTRLGIGGEYWRDYFKSSVNGYFRMSGWHESYNKKDYDERPANGFDIRFNGYLPSYPALGAKLIYEQYYGDNVALFNSDKLQSNPGAATVGVNYTPIPLVTMGIDYRHGTGNENDLLYSMQFRYQFDKSWSQQIEPQYVNELRTLSGSRYDLVQRNNNIILEYKKQDILSLNIPHDINGTEHSTQKIQLIVKSKYGLDRIVWDDSALRSQGGQIQHSGSQSAQDYQAILPAYVQGGSNIYKVTARAYDRNGNSSNNVQLTITVLSNGQVVDQVGVTDFTADKTSAKADNADTITYTATVKKNGVAQANVPVSFNIVSGTATLGANSAKTDANGKATVTLKSSTPGQVVVSAKTAEMTSALNASAVIFFDQTKASVDYKDDDDKSGGGGSGGGGRVQPTESIVRFPNITNLCPFGEVFNATRFASVYAWNRKRISNCVADYSVLYNSASFSTFKCYGVSPTKLNDLCFTNVYADSFVIRGDEVRQIAPGQTGKIADYNYKLPDDFTGCVIAWNSNNLDSKVGGNYNYLYRLFRKSNLKPFERDISTEIYQAGSTPCNGVEGFNCYFPLQSYGFQPTNGVGYQPYRVVVLSFELLHAPATVCGPKKSTNLVKNKCVNFHHHHHH

SEQ ID NO: 1476 - protein, 399 aa, Artificial Sequence
  Description of Artificial Sequence: Synthetic polypeptide
KATKLVLGAVILGSTLLAGCSSNAKIDQGINPYVGFEMGYDWLGRMPYKGSVENGAYKAQGVQLTAKLGYPITDDLDIYTRLGGMVWRADTKSNVYGKNHDTGVSPVFAGGVEYAITPEIATRLEYQWTNNIGDAHTIGTRPDNGIPGVDYKDDDDKSGGGGSGGGGRVQPTESIVRFPNITNLCPFGEVFNATRFASVYAWNRKRISNCVADYSVLYNSASFSTFKCYGVSPTKLNDLCFTNVYADSFVIRGDEVRQIAPGQTGKIADYNYKLPDDFTGCVIAWNSNNLDSKVGGNYNYLYRLFRKSNLKPFERDISTEIYQAGSTPCNGVEGFNCYFPLQSYGFQPTNGVGYQPYRVVVLSFELLHAPATVCGPKKSTNLVKNKCVNFGSGHHHHHH

SEQ ID NO: 1477 - protein, 5 aa, Artificial Sequence
  Description of Artificial Sequence: Synthetic peptide
GGGGS

SEQ ID NO: 1478 - protein, 10 aa, Artificial Sequence
  Description of Artificial Sequence: Synthetic peptide
GGGGSGGGGS

SEQ ID NO: 1479 - protein, 15 aa, Artificial Sequence
  Description of Artificial Sequence: Synthetic peptide
GGGGSGGGGSGGGGS

SEQ ID NO: 1480 - protein, 5 aa, Artificial Sequence
  Description of Artificial Sequence: Synthetic peptide
EAAAK

SEQ ID NO: 1481 - protein, 10 aa, Artificial Sequence
  Description of Artificial Sequence: Synthetic peptide
EAAAKEAAAK

SEQ ID NO: 1482 - protein, 15 aa, Artificial Sequence
  Description of Artificial Sequence: Synthetic peptide
EAAAKEAAAKEAAAK
